(19) United States
(12) Patent Application Publication
(10) Pub. No.: US 2007/0020623 A1
(43) Pub. Date: Jan. 25, 2007

(54) Method for determining homeostasis of the skin

(76) Inventors: Dirk Petersohn, Koeln (DE); Marcus Conradt, Koeln (DE); Kay Hoffmann, Koeln (DE)

Correspondence Address: WOODCOCK WASHBURN LLP, ONE LIBERTY PLACE, 46TH FLOOR, PHILADELPHIA, PA, 19103, US

(21) Appl. No.: 10/250,691

(22) PCT Filed: Dec. 20, 2001
(86) PCT No.: PCT/EP01/15179

§ 371 Date: Jan. 16, 2004

(30) Foreign Application Priority Data
Jan. 3, 2001 (DE) 101 00 127.4

(51) Int. Cl. C12Q 1/68

(52) U.S. Cl. 435/6

(57) ABSTRACT

Described herein are processes and devices useful for the identification of genes differentially expressed in skin. Preferably, the processes and devices are useful for the in vitro determination of skin homeostasis. Also described is a combination having a plurality of genes differentially expressed in skin compared to other tissues. Biochips and test kits useful in processes for the identification of genes expressed in skin homeostasis as well as in processes for screening substances useful in maintaining or promoting homeostasis of the skin are also described. Also described are processes for identifying substances useful in maintaining or promoting homeostasis of the skin as well as processes for making cosmetic and/or pharmaceutical preparations comprising such substances.

[0001] This invention relates to a process for the in vitro determination of the homeostasis of the skin in human beings or animals, to test kits and biochips for determining the homeostasis of the skin and to the use of proteins, mRNA molecules or fragments of proteins or mRNA molecules as markers for the homeostasis of the skin; also to a test for demonstrating the effectiveness of cosmetic or pharmaceutical active substances for maintaining or promoting the homeostasis of the skin or for the treatment of pathological conditions of the skin and to a screening process for identifying cosmetic or pharmaceutical active substances for maintaining or promoting, the homeostasis of the skin or for the treatment of pathological conditions of the skin and to a process for the production of a cosmetic or pharmaceutical preparation for maintaining or promoting the homeostasis of the skin or for the treatment of pathological conditions of the skin.

[0002] Aside from vegetative proliferation, the development of eukaryotic life begins with the fusion of two gametes. A zygote—the origin of each cell of a eukaryote—is formed. The time- and space-ordered differentiation of the daughter cells of a zygote is critical to the ontogenesis of a multicell organism. It leads to a variety of cell types differing in their morphology and their function. If, for example, the nerve cell of a human being is compared with a cell of the epidermis, the cells are found to be very different although both have the same origin and the same genome. The differentiation of cells goes along with modification of gene expression patterns. In the differentiated state, cells express the genes typical of them. Which genes play a role in the morphologies and functions of the skin cells, for example, has hitherto remained largely unclear. The ordered regulation of gene expression in the skin is crucially important to maintenance of the homeostasis of the organ. Each living cell is capable of reacting to signals from its environment. The reactions of the cells are achieved through the ordered regulation of gene expression so that the metabolism of cells is not static but very dynamic.

[0003] The expression of the genes in differentiated cells of the skin is not static, but very dynamic. Extracellular stimuli act on the transcription of living cells through partly complex signal transduction cascades. The regulation of transcription as an answer to extracellular signals is known as stimulus transcription coupling. Influencing this sensitive regulation mechanism can result in disturbance of the homeostasis of the skin and possibly in the formation and manifestation of pathogenic skin conditions.

[0004] According to the most recent estimates, the human genome comprises ca. 140,000 genes. However, of this immense supply of information, each cell uses only a small part specific to it for the synthesis of proteins which is reflected in the gene expression pattern. Which genes particularly in the skin—play a role has hitherto been largely unclear.

[0005] The skin is the largest organ of the human body. It is an organ of very complex structure which consists of a large number of different cell types and which forms the interface between the body and the environment. It follows from this that the cells of the skin are particularly exposed to exogenous physical and chemical environmental signals. The analysis of gene expression in the skin is crucially important to understanding reactions of the skin to exogenous stimuli.

[0006] A key feature of the skin is that, with increasing age, under the effect of skin-damaging stimuli or in cases of pathological skin conditions, the cells lose their ability to maintain the homeostasis of the organ. Which molecular mechanisms are behind this development has hitherto been largely unclear. The identification of new skin-specific markers makes it possible to understand the complex state of homeostasis, the formation and manifestation of pathogenic skin conditions. Only with this knowledge can new concepts be developed for skin treatment products.

[0007] Each cell type of the skin expresses ca. 15,000 different genes and synthesizes a corresponding number of proteins therefrom. However, which of these genes play a role in the homeostasis of the skin or are involved in pathogenic processes has hitherto been largely unclear.

[0008] The skin consists of several different cell types (fibroblasts, keratinocytes in various states of differentiation, melanocytes, Merkel cells, Langerhans cells, hair follicle cells, sweat gland cells, etc.) so that the complexity of genes expressed in the skin is immense. It has not yet been possible to describe this immense complexity. Nor has it yet been possible to identify from this complexity those genes which are expressed exclusively or particularly strongly in the skin.

[0009] In living cells, mRNA molecules occur in concentrations between just a few and several hundred copies. Hitherto, the weakly expressed genes have only been accessible to analyses with great difficulty, if at all. However, these molecules can play a crucial role in the homeostasis of the skin or can be involved in the formation or manifestation of pathogenic processes in the skin.

[0010] The totality of all the mRNA molecules which are synthesized at a certain time by a cell or a tissue is known as a “transcriptome”. Hitherto, it has not been possible to describe the complete transcriptome, i.e. the totality of all transcribed genes, of the human skin.

[0011] Although gene expression can be analyzed by quantification of specific mRNA molecules (for example northern blot, RNase protection experiments), only a relatively limited number of genes can be measured by these techniques.

[0012] Accordingly, there is a need to identify as many as possible and preferably all of the genes that are active in human or animal skin.

[0013] Accordingly, the problem addressed by the present invention was to identify as large a number of the genes expressed in human or animal skin as possible; to identify the genes of importance to the homeostasis of the skin and to provide processes for determining, the homeostasis of the skin by means of the identified genes.

[0014] According to the invention, the solution to this first problem is provided by a process (1) for the in vitro identification of the genes expressed in skin in human beings or animals which is characterized in that
[0015] a) a mixture of genetically coded factors expressed, i.e. transcribed, in human or animal skin, i.e. a mixture of mRNA molecules or fragments of mRNA molecules, is isolated from human or animal skin and
[0016] b) the mixture isolated in a) is subjected to a serial analysis of gene expression (SAGE) so that the genes expressed in human or animal skin are identified and their expression quantified.

[0017] According to the invention, the solution to the second problem is provided by a process (2) for the in vitro identification of the genes relevant to the homeostasis of the skin in: human beings or animals which is characterized in that
[0018] a) a mixture of genetically coded factors expressed, i.e. transcribed, in human or animal skin, i.e. a mixture of mRNA molecules or fragments of mRNA molecules, is isolated from human or animal skin and
[0019] b) the mixture isolated in a) is subjected to a serial analysis of gene expression (SAGE) so that the genes expressed in human or animal skin are identified and their expression quantified and
[0020] c) the analysis results from b) are compared with expression patterns of other tissues to identify the genes which are expressed to different extents (differentially) in skin and other tissues.

[0021] Expression patterns of other tissues can be accessed on-line in the data banks of the Cancer Genome Anatomy Project (CGAP) at the following address: http://cgap.nci.nih.gov/

[0022] The technique of “serial analysis of gene expression” (SAGE™) was used to determine the transcriptome of the skin. This technique enables all the genes expressed in the skin to be simultaneously identified and quantified. By comparing the transcriptome of the skin with the transcriptome of other tissues, it is possible to differentiate between relevant and non-relevant genes for the homeostasis of the skin.

[0023] Human skin from healthy female donors was used for the SAGE™ analysis. The SAGE™ analysis was carried out as described in EP-A-0 761 822 and in Velculescu, V. E. et al., 1995, Science 270, 484-487 and led to the identification of the genes active in skin. These genes are suitable for determining the homeostasis of the skin or for detecting pathological processes or conditions.

[0024] Table 6 contains a detailed list of the genes active in human skin as determined by process (1) according to the invention, indicating
[0025] consecutive order numbers in column 1,
[0026] the tag sequence used in column 2,
[0027] the relative expression frequency determined in skin in column 3,
[0028] the significance in column 4,
[0029] the UniGene Accession Number in column 5 and
[0030] a brief description of the gene or gene product in column 6.

[0031] Tables 1 to 5 contain a detailed list of the genes differentially expressed in skin and in other tissues as determined by process (2) according to the invention, indicating
[0032] consecutive order numbers in column 1,
[0033] the tag sequence used in column 2,
[0034] the relative expression frequency determined in the CGAP (Cancer Genome Anatomy Project) in column 3,
[0035] the relative expression frequency determined in skin in column 4,
[0036] the quotient of the frequencies (from column 3 and column 4) in column 5,
[0037] the significance in column 6,
[0038] the UniGene Accession Number in column 7 and
[0039] a brief description of the gene or gene product in column 8.

[0040] The quotient in column 5 indicates the strength of the differential expression, i.e. the factor by which the particular gene is expressed more strongly in the skin than in other tissues.

[0041] Table 7 contains a list of the genes expressed differentially by a factor of 13.33 to 211.11, indicating
[0042] consecutive order numbers in column 1,
[0043] the tag sequence used in column 2,
[0044] the relative expression frequency determined in the CGAP (Cancer Genome Anatomy Project) in column 3,
[0045] the relative expression frequency determined in skin in column 4,
[0046] the quotient of the frequencies (from column 3 and column 4) in column 5,
[0047] the UniGene Accession Number in column 6 and
[0048] a brief description of the gene or gene product in column 7.

[0049] The assignment of the tags to the genes defined by their Unigene Accession Number in column 6 was done by manual annotation.

[0050] The following data banks were used for the annotation:
[0051] 1. Unigene—30.10.01 version with the following data bank entries:
   [0052] a. known genes from GenBank (12.10.01)
   [0053] b. ESTs from dbEST (19.10.01)
[0054] 2. mRNA-version released on 17.10.01

[0055] The data banks were downloaded from the NCBI, formatted for a local version of the BLAST program (also NCBI) and compared for identical hits with the tags detected in the SAGE analysis.

[0056] The genes/clones found were checked for redundancy and finished as indicated below:
[0057] 1. tag sequences with several different hits: evaluation as non-annotatable
[0058] 2. tag sequences with double or several identical hits: elimination of the hits situated furthest away from the poly-A-tail.

[0059] The results from the Unigene databank were evaluated first and then compared with the results from the mRNA databank. The latter do not appear in Table 7 because they can also be called off via the Unigene entries.

[0060] All the links shown in the Results Table were tested on the 30.10.2001 database documented in the following (Unigene databank release: UniGene Build # 143):

Sequences Included in Unigene

Known genes are from GenBank (Oct. 12, 2001)

ESTs are from dbEST through Oct. 19, 2001

[0061] 69367 mRNAs +gene CDSs

[0062] 1147828 EST, 3′reads

[0063] 1196006 EST, 5′reads

[0064] +598081 EST, other/unknown

[0065] ------------

[0066] 3011282 total sequences in clusters

Final Number of Clusters (sets)

[0067] 96332 sets total

[0068] 20516 sets contain at least one known gene

[0069] 95171 sets contain at least one EST

[0070] 19355 sets contain both genes and ESTs

Release Notes

[0071] The particular genes or gene products are disclosed under their UniGene Accession Number in the databank of the National: Center for Biotechnology Information (NCBI). This databank is accessible on-line at the following address: http://www.ncbi.nim.nih.gov/.

[0072] In addition, the genes or gene products are directly accessible at the following internet addresses:

http://www.ncbi.nim.nih.gov/UniGene/Hs.Home.html or

http://www.ncbi.nlm.nih.gov/genome/quide.

[0073] The data of the Cancer Genome Anatomy Project are accessible on-line at the following address: http://cgap.nci.nih.gov/

[0074] All genes which are expressed differentially by a factor of at least 2 and less than 5 are listed in Table 1.

[0075] All genes which are expressed differentially by a factor of at least 5 and less than 10 are listed in Table 2.

[0076] All genes which are expressed differentially by a factor of at least 10 and less than 20 are listed in Table 3.

[0077] All genes which are expressed differentially by a factor of at least 20 and less than 100 are listed in Table 4.

[0078] All genes which are expressed differentially by a factor of at least 100 are listed in Table 5.

[0079] According to the invention, the solution to the third problem addressed by the present invention is provided by a process (3) for the in vitro determination of the homeostasis of the skin in human beings or animals, more particularly in females, which is characterized in that
[0080] a) a mixture of proteins, mRNA molecules or fragments of proteins or mRNA molecules is isolated from human or animal skin,
[0081] b) the mixture isolated is tested for the presence and optionally the quantity of at least one of the proteins, mRNA molecules or fragments of proteins or mRNA molecules identified as expressed to different extents (differentially) in skin and other tissues by serial analysis of gene expression (SAGE),
[0082] c) the test results from b) are compared with the expression patterns identified by serial analysis of gene expression (SAGE) and
[0083] d) the mixture tested in b) is assigned to healthy skin or skin in homeostasis if it predominantly contains proteins, mRNA molecules or fragments of proteins or mRNA molecules which are expressed more strongly in skin than in other tissues or the mixture tested in b) is assigned to diseased skin or skin in disturbed homeostasis if it predominantly contains proteins, mRNA molecules or fragments of proteins or mRNA molecules which are expressed more strongly in other tissues than in skin.

[0084] It may be sufficient in step b) of the process for determining the homeostasis of the skin to test the isolated mixture for the presence of at least one of the proteins, mRNA molecules or fragments of proteins or mRNA molecules identified as differentially expressed in skin and other tissues by serial analysis of gene expression (SAGE) if they are expressed solely in skin or solely in other tissues. In all other cases, the quantity of differentially expressed molecules must also be determined, i.e. the expression must be quantified, in step b).

[0085] In step d) of the process for determining homeostasis of the skin, the mixture tested in b) is assigned to healthy skin or skin in homeostasis if it predominantly contains proteins, mRNA molecules or fragments of proteins or mRNA molecules which are expressed more strongly in skin than in other tissues, i.e. the mixture either contains more different compounds typically expressed in skin than those which are typically expressed in other tissues (qualitative differentiation) or more copies of compounds typically expressed in skin than typically present in other tissues (quantitative differentiation). A complementary procedure is adopted for assignment to diseased skin or skin in disturbed homeostasis.

[0086] A preferred embodiment of the process according to the invention for determining the homeostasis of the skin is characterized in that, in step b), the mixture isolated is tested for the presence and optionally the quantity of at least one of the proteins, mRNA molecules or fragments of proteins or mRNA molecules defined by their UniGene Accession Number in Tables 1 to 5 and 7, column 7, and in Table 7, column 6; in step c), the test results from b) are compared with the relative expression frequencies shown in Tables 1 to 5, columns 3 and 4 and the expression quotients indicated in column 5; and in step d), the mixture tested in b) is assigned to healthy skin or skin in homeostasis if it predominantly contains proteins, mRNA molecules or fragments of proteins or mRNA molecules which are expressed at least twice as strongly in skin as in other tissues or the mixture tested in b) is assigned to diseased skin or skin in disturbed homeostasis if it predominantly contains proteins, mRNA molecules or fragments of proteins or mRNA molecules which are expressed at least twice as strongly in other tissues as in skin.

[0087] Another preferred embodiment of the process according to the invention for determining the homeostasis of the skin is characterized in that, in step b), the mixture isolated is tested for the presence and optionally the quantity of at least one of the proteins, mRNA molecules or fragments of proteins or mRNA molecules defined by their UniGene Accession Number in Tables 2 to 5, column 7, and in Table 7, column 6; in step c), the test results from b) are compared with the relative expression frequencies shown in Tables 2 to 5, columns 3 and 4, and the expression quotients indicated in column 5; and in step d), the mixture tested in b) is assigned to healthy skin or skin in homeostasis if it predominantly contains proteins, mRNA molecules or fragments of proteins or mRNA molecules which are expressed at least five times as strongly in skin as in other tissues or the mixture tested in b) is assigned to diseased skin or skin in disturbed homeostasis if it predominantly contains proteins, mRNA molecules or fragments of proteins or mRNA molecules which are expressed at least five times as strongly in other tissues as in skin.

[0088] Another preferred embodiment of the process according to the invention for determining the homeostasis of the skin is characterized in that, in step b), the mixture isolated is tested for the presence and optionally the quantity of at least one of the proteins, mRNA molecules or fragments of proteins or mRNA molecules defined by their UniGene Accession Number in Tables 3 to 5, column 7, and in Table 7, column 6; in step c), the test results from b) are compared with the relative expression frequencies shown in Tables 3 to 5, columns 3 and 4, and the expression quotients indicated in column 5; and in step d), the mixture tested in b) is assigned to healthy skin or skin in homeostasis if it predominantly contains proteins, mRNA molecules or fragments of proteins or mRNA molecules which are expressed at least ten times as strongly in skin as in other tissues or the mixture tested in b) is assigned to diseased skin or skin in disturbed homeostasis if it predominantly contains proteins, mRNA molecules or fragments of proteins or mRNA molecules which are expressed at least ten times as strongly in other tissues as in skin.

[0089] Another preferred embodiment of the process according to the invention for determining the homeostasis of the skin is characterized in that, in step b), the mixture isolated is tested for the presence and optionally the quantity of at least one of the proteins, mRNA molecules or fragments of proteins or mRNA molecules defined by their UniGene Accession Number in Tables 4 and 5, column 7; in step c), the test results from b) are compared with the relative expression frequencies shown in Tables 4 and 5, columns 3 and 4, and the expression quotients indicated in column 5; and in step d), the mixture tested in b) is assigned to healthy skin or skin in homeostasis if it predominantly contains proteins, mRNA molecules or fragments of proteins or mRNA molecules which are expressed at least twenty times as strongly in skin as in other tissues or the mixture tested in b) is assigned to diseased skin or skin in disturbed homeostasis if it predominantly contains proteins, mRNA molecules or fragments of proteins or mRNA molecules which are expressed at least twenty times as strongly in other tissues as in skin.

[0090] Another preferred embodiment of the process according to the invention for determining the homeostasis of the skin is characterized in that, in step b), the mixture isolated is tested for the presence and optionally the quantity of at least one of the proteins, mRNA molecules or fragments of proteins or rRNA molecules defined by their UniGene Accession Number in Table 5, column 7; in step c), the test results from b) are compared with the relative expression frequencies shown in Table 5, columns 3 and 4, and the expression quotients indicated in column 5; and in step d), the mixture tested in b) is assigned to healthy skin or skin in homeostasis if it predominantly contains proteins, mRNA molecules or fragments of proteins or mRNA molecules which are expressed at least one hundred times as strongly in skin as in other tissues or the mixture tested in b) is assigned to diseased skin or skin in disturbed homeostasis if it predominantly contains proteins, mRNA molecules or fragments of proteins or mRNA molecules which are expressed at least one hundred times as strongly in other tissues as in skin.

[0091] The condition of the skin may also be described by quantifying several markers (expression products of the genes important to the homeostasis of the skin) which then have to be active in a certain ratio to one another in order to represent skin in homeostasis. Any deviations from that ratio point to the fact that the skin under analysis is not in homeostasis.

[0092] Accordingly, the present invention also relates to a process (4) for the in vitro determination of the homeostasis of the skin in human beings or animals, more particularly in females, which is characterized n that
[0093] a) a mixture of proteins, mRNA molecules or fragments of proteins or mRNA molecules is isolated from human or animal skin,
[0094] b) in the mixture isolated, at least two of the proteins, mRNA molecules or fragments of proteins or mRNA molecules identified as important to the homeostasis of the skin by process (2) are quantified,
[0095] c) the expression ratios of the at least two proteins, mRNA molecules or fragments of proteins or mRNA molecules to one another are determined,
[0096] d) the expression ratios from c) are compared with the expression ratios typically present in homeostatic skin for the molecules quantified in b), more particularly with the expression ratios shown in Table 6, column 3 and in Tables 1 to 5, column 4 and
[0097] e) the mixture isolated in a) is assigned to healthy skin or to skin in homeostasis if the expression ratios of the skin under analysis correspond to the expression ratios of skin in homeostasis or the mixture isolated in a) is assigned to diseased skin or to skin in disturbed homeostasis if the expression ratios of the skin under analysis differ from the expression ratios of skin in homeostasis.

[0098] In step a) of the process according to the invention for determining the homeostasis of the skin, the mixture is preferably isolated from a skin sample, more particularly from a whole skin sample or from an epidermis sample. The whole skin sample offers more comprehensive possibilities for comparison with the SAGE libraries which are similarly obtained from whole skin. By contrast, the epidermis sample is easier to obtain, for example by applying an adhesive plaster to the skin and stripping it off, as described in WO 00/10579 to the whole of which reference is hereby made.

[0099] In another embodiment of the process according to the invention for determining the homeostasis of the skin, the mixture is isolated in step a) by microdialysis. The technique of microdialysis is described, for example, in “Microdialysis: A method for measurement of local tissue metabolism”, Nielsen, P. S., Winge, K., Petersen, L. M.; Ugeskr Laeger 1999, Mar. 22, 161:12 1735-8: and in “Cutaneous microdialysis for human in vivo dermal absorption studies”, Anderson, C. et al.; Drugs Pharm. Sci., 1998, 91, 231-244; and also on-line at http://www.microdialysis.se/techniqu.htm, to the whole of which reference is hereby made. In microdialysis, a probe is typically inserted into the skin and slowly rinsed with a suitable carrier solution. After the acute reactions have abated after insertion, microdialysis yields proteins, mRNA molecules or fragments of proteins or mRNA molecules which occur in the extracellular space and which can then be isolated in vitro, for example by fractionation of the carrier liquid, and analyzed. Microdialysis is less invasive than the removal of a whole skin sample but has the disadvantage that it is limited to the isolation of compounds occurring in the extracellular space.

[0100] Another preferred embodiment of the process according to the invention for determining the homeostasis of the skin is characterized in that, in step b) in process (3), testing for the presence and optionally the quantity of at least one of the proteins or protein fragments; or, in process (4), the quantification of at least two proteins or protein fragments is carried out by a method selected from
[0101] one- or two-dimensional gel electrophoresis
[0102] affinity chromatography
[0103] protein/protein complexing in solution
[0104] mass spectrometry, more particularly Matrix Assisted Laser Desorption Ionization (MALDI) and, more particularly,
[0105] the use of protein chips,
   or suitable combinations of these methods.

[0106] These methods suitable for use in accordance with the invention are described in the overview by Akhilesh Pandey and Matthias Mann: “Proteomics to study genes and genomes”, Nature, Volume 405, Number 6788, 837-846 (2000) and the references cited therein, to the whole of which reference is hereby made.

[0107] 2D gel electrophoresis is described, for example, in L. D. Adams, Two-dimensional Gel Electrophoresis using the Isodalt System or in L. D. Adams and S. R. Gallagher, Two-dimensional Gel Electrophoresis using the O'Farrell System; both in Current Protocols in Molecular Biology (1997), Eds. F. M. Ausubel et al.), Unit 10.3.1-10.4.13; or in 2-D Electrophoresis Manual; T. Berkelman, T. Senstedt; Amersham Pharmacia Biotech, 1998 (Order No. 80-6429-60).

[0108] The mass spectrometric characterization of the proteins or protein fragments is conducted in known manner, for example as described in the following literature references:

Methods in Molecular Biology, 1999; Vol. 112; 2-D Proteome Analysis Protocols; Editor: A. J. Link; Humana Press; Totowa; N. J.; cf. in particular Courchesne, P. L. and Patterson, S. D.; pp. 487-512.

Carr S. A. and Annan, R. S.; 1997; in: Current Protocols in Molecular Biology; Editor: Ausubel, F. M. et al.; John Wiley and Sons, Inc. 10.2.1-10.21.27.

[0109] Another preferred embodiment of the process according to the invention for determining the homeostasis of the skin is characterized in that, in step b) in process (3), testing for the presence and optionally the quantity of at least one of the mRNA molecules or mRNA molecule fragments; or, in process (4), the quantification of at least two mRNA molecules or mRNA molecule fragments is carried out by a method selected from

i. northern blots,

ii. reverse transcriptase polymerase chain reaction (RT-PCR),

iii. RNase protection experiments,

iv. dot blots,

v. cDNA sequencing,

vi. clone hybridization,

vii. differential display,

viii. subtractive hybridization,

ix. cDNA fragment finterprinting,

x. total gene expression analysis (TOGA)

xi. serial analysis of gene expression (SAGE) and, more particularly,

xii. the use of nucleic acid chips

or suitable combinations of these methods.

[0110] These methods suitable for use in accordance with the invention are described in the overviews by Akhilesh Pandey and Matthias Mann: “Proteomics to study genes and genomes”, Nature, Volume 405, Number 6788, 837-846 (2000) and “Genomics, gene expression and DNA arrays”, Nature, Volume 405, Number 6788, 827-836 (2000) and the references cited therein, to the whole of which reference is hereby made.

[0111] The TOGA process is described in “J. Gregor Sutcliffe et al., TOGA: An automated parsing technology for analyzing expression of nearly all genes, Proceedings of the National Academy of Sciences of the United States of America (PNAS), Vol. 97, No. 5, pp. 1976-1981 (2000)”, to the whole of which reference is hereby made.

[0112] According to the invention, however, other methods known to the expert may also be used to test for the presence and optionally the quantity of at least one of the proteins, mRNA molecules or fragments of proteins or mRNA molecules.

[0113] Another preferred embodiment of the process according to the invention for determining the homeostasis of the skin is characterized in that step b) comprises testing for the presence and optionally the quantity of 1 to about 5,000, preferably 1 to about 1,000, more preferably about 10 to about 500, most preferably about 10 to about 250, more particularly about 10 to about 100 and most particularly about 10 to about 50 of the proteins, mRNA molecules or fragments of proteins or mRNA molecules which are defined by their Unigene Accession Number in Tables 1 to 5, column 7, and in Table 7, column 6.

[0114] The present invention also relates to a test kit for the in vitro determination of the homeostasis of the skin in human beings or animals comprising means for carrying out the process according to the invention for determining the homeostasis of the skin.

[0115] The present invention also relates to a biochip for the in vitro determination of the homeostasis of the skin in human beings or animals comprising
[0116] i. a firm, i.e. rigid, or flexible support and,
[0117] ii. immobilized thereon, probes which are capable of binding specifically to at least one of the proteins, mRNA molecules or fragments of proteins or mRNA molecules which are defined by their UniGene Accession Number in Tables 1 to 5, column 7, and in Table 7, column 6.

[0118] A biochip is a miniaturized functional element with molecules, more particularly biomolecules, immobilized on a surface which are capable of acting as specific interaction partners. The structure of these functional elements often comprise rows and columns. They are then known as chip arrays. Since thousands of biological or biochemical functional elements can be arranged on one chip, they generally have to be made by microtechnical methods. Biological and biochemical functional elements include in particular DNA, RNA, PNA (in the case of nucleic acids and chemical derivatives thereof, single strands, triplex structures or combinations thereof, for example, may be present), saccharides, peptides, proteins (for example antibodies, antigens, receptors) and derivatives of combinatorial chemistry (for example organic molecules). Biochips generally have a two-dimensional base for coating with biologically or biochemically active materials. The bases may also be formed, for example, by walls of one or more capillaries or by channels. The prior art is represented, for example, by the following publications: Nature Genetics, Vol. 21, Supplement (entire), January 1999 (Biochips); Nature Biotechnology, Vol. 16, pp. 981-983, October 1998 (Biochips); Trends in Biotechnology, Vol. 16, pp. 301-306, July 1998 (Biochips) and the already cited overviews by Akhilesh Pandey and Matthias Mann: “Proteomics to study genes and genomes”, Nature, Volume 405, Number 6788, 837-846 (2000) and “Genomics, gene expression and DNA arrays”, Nature, Volume 405, Number 6788, 827-836 (2000) and the references cited therein, to the whole of which reference is hereby made.

[0119] A synoptic portrayal of the practical methods of using DNA chip technology can be found in the books “DNA Microarrays: A Practical Approach” (Editor: Mark Schena, 1999, Oxford University Press) and “Microarray Biochip Technology” (Editor: Mark Schena, 2000, Eaton Publishing), to the whole of which reference is hereby made.

[0120] The particularly preferred DNA chip technology in the context of the present invention is based on the ability of nucleic acids to enter into complementary base pairings. This technical principle known as hybridization has been used for years in southern blot and northern blot analysis. By comparison with these conventional methods where only a few genes are analyzed, DNA chip technology enables a few hundred to several thousand genes to be analyzed at the same time. A DNA chip consists essentially of a support material (for example glass or plastic) on which single-stranded gene-specific probes are immobilized in high density at a particular spot. The technique of probe application and the chemistry of probe immobilization are rated as problematical.

[0121] In the present state of the art, probe immobilization can be carried out in several ways:

[0122] E. M. Southern (E. M. Southern et al. (1992), Nucleic Acid Research 20, 1679-1684 and E. M. Southern et al. (1997), Nucleic Acid Research 25, 1155-1161) describes the production of oligonucleotide arrangements by direct synthesis on a glass surface derivatized with 3-glycidoxypropyl trimethoxysilane and then with a glycol. A similar process achieves the in situ synthesis of oligonucleotides by photosensitive combinatorial chemistry which may be compared with photolithographic techniques (Pease, A. C. et al. (1994), Proc. Natl. Acad. Sci. USA 91, 5022-5026).

[0123] Besides these techniques based on the in situ synthesis of oligonucleotides, already present DNA molecules can also be immobilized on surfaces of support material.

[0124] P. O. Brown (DeRisi et al. (1997), Science 278, 680-686) describes the immobilization of DNA on glass surfaces coated with polylysine.

[0125] The Article by L. M. Smith (Guo, Z. et al. (1994), Nucleic Acid Research 22, 5456-5465) discloses a similar process: oligonucleotides carrying a 5′-terminal amino group can be immobilized on a glass surface treated with 3-aminopropyl trimethoxysilane and then with 1,4-phenyl diisothiocyanate.

[0126] The DNA probes may be applied to a support using a so-called pin spotter. To this end, thin metal needles, for example 250 μm in diameter, dip into probe solutions and then transfer the adhering sample material in defined volumes to the support material of the DNA chip.

[0127] However, the probes are preferably applied by means of a piezo-controlled nanodispenser which—similarly to an ink jet printer—applies probe solutions With a volume of 100 picoliters to the surface of the support material without any contact.

[0128] The probes are immobilized as described, for example, in EP-A-0 965 647. DNA probes are generated by PCR using a sequence-specific primer pair, one primer being modified at the 5′-end and carrying a linker with a free amino group. This ensures that a defined strand of the PCR products can be immobilized on a glass surface treated with 3-aminopropyl trimethoxysilane and then with 1,4-phenyl diisothiocyanate. Ideally, the gene-specific PCR products should comprise a defined nucleic acid sequence with a length of 200400 bp and non-redundant sequences. After immobilization of the PCR products via the derivatized primer, the counter-strand of the PCR product is removed by incubation for 10 mins. at 96° C.

[0129] In one application typical of DNA chips, mRNA is isolated from two cell populations to be compared. The isolated mRNAs are converted into cDNA by reverse transcription using, for example, fluorescence-marked nucleotides. The samples to be compared are marked, for example, with red- or green-fluorescing nucleotides. The cDNAs are then hybridized with the gene probes immobilized on the DNA chip and the fixed fluorescences are then quantified.

[0130] The biochip according to the invention preferably comprises 1 to about 5,000, preferably 1 to about 1,000, more preferably about 10 to about 500, most preferably about 10 to about 250, more particularly about 10 to about 100 and most particularly about 10 to about 50 different probes. The different probes may be present as multiple copies on the chip.

[0131] The biochip according to the invention preferably comprises nucleic acid probes, more particularly RNA or PNA probes and most particularly DNA probes. The nucleic acid probes preferably have a length of about 10 to about 1,000, more preferably a length of about 10 to about 800, most preferably a length of about 100 to about 600 and, in one most particularly preferred embodiment, a length of about 200 to about 400 nucleotides.

[0132] In another preferred embodiment, the biochip according to the invention comprises peptide or protein probes, more particularly antibodies.

[0133] The present invention also relates to the use of the proteins, mRNA molecules or fragments of proteins or mRNA molecules which are defined by their UniGene Accession Number in Tables 1 to 5, column 7, and in Table 7, column 6, as markers for the homeostasis of the skin in human beings or animals.

[0134] The present invention also relates to a test for demonstrating the effectiveness of cosmetic or pharmaceutical active substances for maintaining or promoting the homeostasis of the skin or for the in vitro treatment of pathological conditions of the skin, such as neurodermatitis, sunburn, psoriasis, scleroderma, ichtyosis, atopic dermatitis, acne, seborrhoea, lupus erythematodes, roseacea, melanoma, basalioma, skin carcinoma, skin sarcoma, characterized in that
[0135] a) the status of the skin is determined by a process according to the invention for determining the homeostasis of the skin or with the aid of a test kit according to the invention for determining the homeostasis of the skin or with the aid of a biochip according to the invention,
[0136] b) an active substance for maintaining or promoting the homeostasis of the skin or for treating pathological skin conditions is applied one or more times to the skin,
[0137] c) the status of the skin is re-determined by a process according to the invention for determining, the homeostasis of the skin or with the aid of a test kit according to the invention for determining the homeostasis of the skin or with the aid of a biochip according to the invention and
[0138] d) the effectiveness of the active substance is determined by comparing the results from a) and c).

[0139] In order to accelerate the test, various active substances or placebos may be simultaneously applied to different areas of the skin. For example, an active substance may be applied to the left forearm and a placebo to the right forearm or vice versa.

[0140] The present invention also relates to a test kit for demonstrating the effectiveness of cosmetic or pharmaceutical active substances for maintaining or promoting the homeostasis of the skin or for the in vitro treatment of pathological skin conditions comprising means for carrying out the test according to the invention.

[0141] The present invention also relates to the use of the proteins, mRNA molecules or fragments of proteins or mRNA molecules which are defined by their UniGene Accession Number in Tables 1 to 5, column 7, and in Table 7, column 6, for demonstrating the effectiveness of cosmetic or pharmaceutical active substances for maintaining or promoting the homeostasis of the skin or for treating pathological skin conditions, such as neurodermatitis, sunburn, psoriasis, scleroderma, ichtyosis, atopic dermatitis, acne, seborrhoea, lupus erythematodes, roseacea, melanoma, basalioma, skin carcinoma, skin sarcoma.

[0142] The present invention also relates to a screening process for identifying cosmetic or pharmaceutical active substances for maintaining or promoting the homeostasis of the skin or for the in vitro treatment of pathological conditions of the skin, such as neurodermatitis, sunburn, psoriasis, scleroderma, ichtyosis, atopic dermatitis, acne, seborrhoea, lupus erythematodes, roseacea, melanoma, basalioma, skin carcinoma, skin sarcoma, characterized in that
[0143] a) the status of the skin is determined by a process according to the invention for determining the homeostasis of the skin or with the aid of a test kit according to the invention for determining the homeostasis of the skin or with the aid of a biochip according to the invention,
[0144] b) an active substance for maintaining or promoting the homeostasis of the skin or for treating pathological skin conditions is applied one or more times to the skin,
[0145] c) the status of the skin is re-determined by a process according to the invention for determining the homeostasis of the skin or with the aid of a test kit according to the invention for determining the homeostasis of the skin or with the aid of a biochip according to the invention and
[0146] d) effective active substances are determined by comparing the results from a) and c).

[0147] The present invention also relates to the use of the proteins, mRNA molecules or fragments of proteins or mRNA molecules which are defined by their UniGene Accession Number in Tables 1 to 5, column 7, and in Table 7, column 6, for identifying cosmetic or pharmaceutical active substances for maintaining or promoting the homeostasis of the skin or for treating of pathological skin conditions, such as neurodermatitis, sunburn, psoriasis, scleroderma, ichtyosis, atopic dermatitis, acne, seborrhoea, lupus erythematodes, roseacea, melanoma, basalioma, skin carcinoma, skin sarcoma.

[0148] The present invention also relates to a process for the production of a cosmetic or pharmaceutical preparation for maintaining or promoting the homeostasis of the skin or for treating pathological skin conditions, such as neurodermatitis, sunburn, psoriasis, scleroderma, ichtyosis, atopic dermatitis, acne, seborrhoea, lupus erythematodes, roseacea, melanoma, basalioma, skin carcinoma, skin sarcoma, characterized in that
[0149] a) effective active substances are determined by the screening process according to the invention or by the use for identifying cosmetic or pharmaceutical active substances for maintaining or promoting the homeostasis of the skin or for treating pathological skin conditions and
[0150] b) active substances found to be effective are mixed with cosmetically and pharmacologically suitable and compatible carriers.

[0151] Tables:

LENGTHY TABLE REFERENCED HERE
US20070020623A1-20070125-T00001
Please refer to the end of the specification for access instructions.

LENGTHY TABLE REFERENCED HERE
US20070020623A1-20070125-T00002
Please refer to the end of the specification for access instructions.

LENGTHY TABLE REFERENCED HERE
US20070020623A1-20070125-T00003
Please refer to the end of the specification for access instructions.

LENGTHY TABLE REFERENCED HERE
US20070020623A1-20070125-T00004
Please refer to the end of the specification for access instructions.

LENGTHY TABLE REFERENCED HERE
US20070020623A1-20070125-T00005
Please refer to the end of the specification for access instructions.

LENGTHY TABLE REFERENCED HERE
US20070020623A1-20070125-T00006
Please refer to the end of the specification for access instructions.

LENGTHY TABLE REFERENCED HERE
US20070020623A1-20070125-T00007
Please refer to the end of the specification for access instructions.

LENGTHY TABLE
The patent application contains a lengthy table section. A copy of the table is available in electronic form from the USPTO web site (http://seqdata.uspto.gov/?pageRequest=docDetail&DocID=US20070020623A1) An electronic copy of the table will also be available from the USPTO upon request and payment of the fee set forth in 37 CFR 1.19(b)(3).

The application's sequence listing, which the Patent Office published only in electronic form, follows.

SEQUENCE LISTING (7499 sequences)

SEQ ID NO: 1 - DNA, 11 bp, Homo sapiens
atccgcgaggc

SEQ ID NO: 2 - DNA, 11 bp, Homo sapiens
gagataaatga

SEQ ID NO: 3 - DNA, 11 bp, Homo sapiens
taaacctgctg

SEQ ID NO: 4 - DNA, 11 bp, Homo sapiens
gatgtgcacga

SEQ ID NO: 5 - DNA, 11 bp, Homo sapiens
acatttcaaag

SEQ ID NO: 6 - DNA, 11 bp, Homo sapiens
tttgtagagga

SEQ ID NO: 7 - DNA, 11 bp, Homo sapiens
acctccactgg

SEQ ID NO: 8 - DNA, 11 bp, Homo sapiens
aatcttgtttc

SEQ ID NO: 9 - DNA, 11 bp, Homo sapiens
gaaaacaaagt

SEQ ID NO: 10 - DNA, 11 bp, Homo sapiens
gcccctgctga

SEQ ID NO: 11 - DNA, 11 bp, Homo sapiens
cacacgggcga

SEQ ID NO: 12 - DNA, 11 bp, Homo sapiens
gacaataaatg

SEQ ID NO: 13 - DNA, 11 bp, Homo sapiens
actaccataac

SEQ ID NO: 14 - DNA, 11 bp, Homo sapiens
cattgtaaata

SEQ ID NO: 15 - DNA, 11 bp, Homo sapiens
accggcgcccg

SEQ ID NO: 16 - DNA, 11 bp, Homo sapiens
ccaccacgctt

SEQ ID NO: 17 - DNA, 11 bp, Homo sapiens
ccccggccacc

SEQ ID NO: 18 - DNA, 11 bp, Homo sapiens
tgaaataaaag

SEQ ID NO: 19 - DNA, 11 bp, Homo sapiens
actgagtaggt

SEQ ID NO: 20 - DNA, 11 bp, Homo sapiens
atccttgctga

SEQ ID NO: 21 - DNA, 11 bp, Homo sapiens
cagcctgggtg

SEQ ID NO: 22 - DNA, 11 bp, Homo sapiens
gatatgttata

SEQ ID NO: 23 - DNA, 11 bp, Homo sapiens
tggcttcatca

SEQ ID NO: 24 - DNA, 11 bp, Homo sapiens
cctgtaacacc

SEQ ID NO: 25 - DNA, 11 bp, Homo sapiens
ccccggaggtc

SEQ ID NO: 26 - DNA, 11 bp, Homo sapiens
agatcagttga

SEQ ID NO: 27 - DNA, 11 bp, Homo sapiens
ccctcagcacc

SEQ ID NO: 28 - DNA, 11 bp, Homo sapiens
ctttattccag

SEQ ID NO: 29 - DNA, 11 bp, Homo sapiens
tccactggcct

SEQ ID NO: 30 - DNA, 11 bp, Homo sapiens
cacgcagtggc

SEQ ID NO: 31 - DNA, 11 bp, Homo sapiens
tacattatata

SEQ ID NO: 32 - DNA, 11 bp, Homo sapiens
atggatacggg

SEQ ID NO: 33 - DNA, 11 bp, Homo sapiens
ccgggggagcc

SEQ ID NO: 34 - DNA, 11 bp, Homo sapiens
cagtttttttc

SEQ ID NO: 35 - DNA, 11 bp, Homo sapiens
gtggattcaag

SEQ ID NO: 36 - DNA, 11 bp, Homo sapiens
tgtctgtgtgt

SEQ ID NO: 37 - DNA, 11 bp, Homo sapiens
tctacacgtgc

SEQ ID NO: 38 - DNA, 11 bp, Homo sapiens
gaaatggcagt

SEQ ID NO: 39 - DNA, 11 bp, Homo sapiens
acgaaacctcg

SEQ ID NO: 40 - DNA, 11 bp, Homo sapiens
ggcaatgcagt

SEQ ID NO: 41 - DNA, 11 bp, Homo sapiens
ccttttcagca

SEQ ID NO: 42 - DNA, 11 bp, Homo sapiens
cctctttaaca

SEQ ID NO: 43 - DNA, 11 bp, Homo sapiens
tatctagctgc

SEQ ID NO: 44 - DNA, 11 bp, Homo sapiens
gctgtaatcct

SEQ ID NO: 45 - DNA, 11 bp, Homo sapiens
gggcagccgcc

SEQ ID NO: 46 - DNA, 11 bp, Homo sapiens
cgcttgtttaa

SEQ ID NO: 47 - DNA, 11 bp, Homo sapiens
gcacacacctg

SEQ ID NO: 48 - DNA, 11 bp, Homo sapiens
ctggagtcggc

SEQ ID NO: 49 - DNA, 11 bp, Homo sapiens
gaggtcagttg

SEQ ID NO: 50 - DNA, 11 bp, Homo sapiens
ccaggcaagac

SEQ ID NO: 51 - DNA, 11 bp, Homo sapiens
gaaatcaaaaa

SEQ ID NO: 52 - DNA, 11 bp, Homo sapiens
aatctagttct

SEQ ID NO: 53 - DNA, 11 bp, Homo sapiens
aagctaataaa

SEQ ID NO: 54 - DNA, 11 bp, Homo sapiens
tgtgcggcttc

SEQ ID NO: 55 - DNA, 11 bp, Homo sapiens
caggtttcata

SEQ ID NO: 56 - DNA, 11 bp, Homo sapiens
ctgtcgtcatc

SEQ ID NO: 57 - DNA, 11 bp, Homo sapiens
atagcacgtgc

SEQ ID NO: 58 - DNA, 11 bp, Homo sapiens
gtgagaactcg

SEQ ID NO: 59 - DNA, 11 bp, Homo sapiens
acttattatgc

SEQ ID NO: 60 - DNA, 11 bp, Homo sapiens
cttgcagtcct

SEQ ID NO: 61 - DNA, 11 bp, Homo sapiens
catctgtactc

SEQ ID NO: 62 - DNA, 11 bp, Homo sapiens
gtggagggcac

SEQ ID NO: 63 - DNA, 11 bp, Homo sapiens
aggcaggaaaa

SEQ ID NO: 64 - DNA, 11 bp, Homo sapiens
aattgaaaagg

SEQ ID NO: 65 - DNA, 11 bp, Homo sapiens
ctttaaaatga

SEQ ID NO: 66 - DNA, 11 bp, Homo sapiens
tgtgccagttt

SEQ ID NO: 67 - DNA, 11 bp, Homo sapiens
agtagctggga

SEQ ID NO: 68 - DNA, 11 bp, Homo sapiens
cctctgtctcc

SEQ ID NO: 69 - DNA, 11 bp, Homo sapiens
aacatttagga

SEQ ID NO: 70 - DNA, 11 bp, Homo sapiens
caataaaattt

SEQ ID NO: 71 - DNA, 11 bp, Homo sapiens
gccgctcaagg

SEQ ID NO: 72 - DNA, 11 bp, Homo sapiens
cctggtcaaga

SEQ ID NO: 73 - DNA, 11 bp, Homo sapiens
ccaccgcagga

SEQ ID NO: 74 - DNA, 11 bp, Homo sapiens
acacttctcaa

SEQ ID NO: 75 - DNA, 11 bp, Homo sapiens
cctctctggtc

SEQ ID NO: 76 - DNA, 11 bp, Homo sapiens
gcatatctgtg

SEQ ID NO: 77 - DNA, 11 bp, Homo sapiens
agctgtgatgg

SEQ ID NO: 78 - DNA, 11 bp, Homo sapiens
gctaacttaaa

SEQ ID NO: 79 - DNA, 11 bp, Homo sapiens
ccttgaaatca

SEQ ID NO: 80 - DNA, 11 bp, Homo sapiens
ctttatcaata

SEQ ID NO: 81 - DNA, 11 bp, Homo sapiens
acagccctgat

SEQ ID NO: 82 - DNA, 11 bp, Homo sapiens
gatactcagaa

SEQ ID NO: 83 - DNA, 11 bp, Homo sapiens
gcctgggagac

SEQ ID NO: 84 - DNA, 11 bp, Homo sapiens
tgggtggtggt

SEQ ID NO: 85 - DNA, 11 bp, Homo sapiens
agctaccacag

SEQ ID NO: 86 - DNA, 11 bp, Homo sapiens
acagcggcaat

SEQ ID NO: 87 - DNA, 11 bp, Homo sapiens
gtaaaatccca

SEQ ID NO: 88 - DNA, 11 bp, Homo sapiens
cacttgtaatc

SEQ ID NO: 89 - DNA, 11 bp, Homo sapiens
cttgtagttcc

SEQ ID NO: 90 - DNA, 11 bp, Homo sapiens
gggttttctgg

SEQ ID NO: 91 - DNA, 11 bp, Homo sapiens
cagcagaactg

SEQ ID NO: 92 - DNA, 11 bp, Homo sapiens
ccacaggagaa

SEQ ID NO: 93 - DNA, 11 bp, Homo sapiens
atagccaggga

SEQ ID NO: 94 - DNA, 11 bp, Homo sapiens
gtacaaaagta

SEQ ID NO: 95 - DNA, 11 bp, Homo sapiens
tcacagggtcc

SEQ ID NO: 96 - DNA, 11 bp, Homo sapiens
ttctgtgtgcc

SEQ ID NO: 97 - DNA, 11 bp, Homo sapiens
tagccgggacg

SEQ ID NO: 98 - DNA, 11 bp, Homo sapiens
atcacacagct

SEQ ID NO: 99 - DNA, 11 bp, Homo sapiens
atctcgaaagg

SEQ ID NO: 100 - DNA, 11 bp, Homo sapiens
gacccaactgg

SEQ ID NO: 101 - DNA, 11 bp, Homo sapiens
cacagggagga

SEQ ID NO: 102 - DNA, 11 bp, Homo sapiens
cagctggccca

SEQ ID NO: 103 - DNA, 11 bp, Homo sapiens
gagggctttgc

SEQ ID NO: 104 - DNA, 11 bp, Homo sapiens
gtgagccaaga

SEQ ID NO: 105 - DNA, 11 bp, Homo sapiens
taccccaaaaa

SEQ ID NO: 106 - DNA, 11 bp, Homo sapiens
caggatgcttg

SEQ ID NO: 107 - DNA, 11 bp, Homo sapiens
agtgtgttgca

SEQ ID NO: 108 - DNA, 11 bp, Homo sapiens
aggacctgaag

SEQ ID NO: 109 - DNA, 11 bp, Homo sapiens
attctggtcat

SEQ ID NO: 110 - DNA, 11 bp, Homo sapiens
ccttttgggag

SEQ ID NO: 111 - DNA, 11 bp, Homo sapiens
cggttcataca

SEQ ID NO: 112 - DNA, 11 bp, Homo sapiens
atggtgccacc

SEQ ID NO: 113 - DNA, 11 bp, Homo sapiens
taatgttaatg

SEQ ID NO: 114 - DNA, 11 bp, Homo sapiens
agggccctctg

SEQ ID NO: 115 - DNA, 11 bp, Homo sapiens
gtggcacgcgt

SEQ ID NO: 116 - DNA, 11 bp, Homo sapiens
agcttgagttc

SEQ ID NO: 117 - DNA, 11 bp, Homo sapiens
gtggggccaag

SEQ ID NO: 118 - DNA, 11 bp, Homo sapiens
gtgaagcctca

SEQ ID NO: 119 - DNA, 11 bp, Homo sapiens
accagacagac

SEQ ID NO: 120 - DNA, 11 bp, Homo sapiens
gtgaaactctt

SEQ ID NO: 121 - DNA, 11 bp, Homo sapiens
atttccattaa

SEQ ID NO: 122 - DNA, 11 bp, Homo sapiens
gtggtaagcac

SEQ ID NO: 123 - DNA, 11 bp, Homo sapiens
gttttgcccac

SEQ ID NO: 124 - DNA, 11 bp, Homo sapiens
gcccacacagc

SEQ ID NO: 125 - DNA, 11 bp, Homo sapiens
tttcctctcaa

SEQ ID NO: 126 - DNA, 11 bp, Homo sapiens
cgggagcgcta

SEQ ID NO: 127 - DNA, 11 bp, Homo sapiens
ttgcatatcag

SEQ ID NO: 128 - DNA, 11 bp, Homo sapiens
aggcctcggca

SEQ ID NO: 129 - DNA, 11 bp, Homo sapiens
gtggcgaatga

SEQ ID NO: 130 - DNA, 11 bp, Homo sapiens
tgtgaagcctt

SEQ ID NO: 131 - DNA, 11 bp, Homo sapiens
tcagacttttg

SEQ ID NO: 132 - DNA, 11 bp, Homo sapiens
atttcttcaag

SEQ ID NO: 133 - DNA, 11 bp, Homo sapiens
gaattatactt

SEQ ID NO: 134 - DNA, 11 bp, Homo sapiens
tctggggaaca

SEQ ID NO: 135 - DNA, 11 bp, Homo sapiens
gcaaaaacccg

SEQ ID NO: 136 - DNA, 11 bp, Homo sapiens
aatgttgtgca

SEQ ID NO: 137 - DNA, 11 bp, Homo sapiens
acaatgttgta

SEQ ID NO: 138 - DNA, 11 bp, Homo sapiens
cgagagtgtga

SEQ ID NO: 139 - DNA, 11 bp, Homo sapiens
gtataaaaaaa

SEQ ID NO: 140 - DNA, 11 bp, Homo sapiens
aggtcgaggct

SEQ ID NO: 141 - DNA, 11 bp, Homo sapiens
cccggcccagt

SEQ ID NO: 142 - DNA, 11 bp, Homo sapiens
ttgacccagcc

SEQ ID NO: 143 - DNA, 11 bp, Homo sapiens
tattttatttg

SEQ ID NO: 144 - DNA, 11 bp, Homo sapiens
gcatcataggt

SEQ ID NO: 145 - DNA, 11 bp, Homo sapiens
taccgctccct

SEQ ID NO: 146 - DNA, 11 bp, Homo sapiens
ctcctgtggtc

SEQ ID NO: 147 - DNA, 11 bp, Homo sapiens
ggtgtctcctc

SEQ ID NO: 148 - DNA, 11 bp, Homo sapiens
caatcttgtga

SEQ ID NO: 149 - DNA, 11 bp, Homo sapiens
cctacaaaaaa

SEQ ID NO: 150 - DNA, 11 bp, Homo sapiens
tgtgcccagcc

SEQ ID NO: 151 - DNA, 11 bp, Homo sapiens
gatggggacag

SEQ ID NO: 152 - DNA, 11 bp, Homo sapiens
taaaaatattg

SEQ ID NO: 153 - DNA, 11 bp, Homo sapiens
tttaagttagg

SEQ ID NO: 154 - DNA, 11 bp, Homo sapiens
gtatatgtatt

SEQ ID NO: 155 - DNA, 11 bp, Homo sapiens
ctaaagtgtca

SEQ ID NO: 156 - DNA, 11 bp, Homo sapiens
aatttggcttt

SEQ ID NO: 157 - DNA, 11 bp, Homo sapiens
ccgtggcacca

SEQ ID NO: 158 - DNA, 11 bp, Homo sapiens
agcacccttgt

SEQ ID NO: 159 - DNA, 11 bp, Homo sapiens
cctttgagagc

SEQ ID NO: 160 - DNA, 11 bp, Homo sapiens
taaatgtaaat

SEQ ID NO: 161 - DNA, 11 bp, Homo sapiens
tacagacatac

SEQ ID NO: 162 - DNA, 11 bp, Homo sapiens
gtagcatttgc

SEQ ID NO: 163 - DNA, 11 bp, Homo sapiens
aagtaggtttt

SEQ ID NO: 164 - DNA, 11 bp, Homo sapiens
atcactcccca

SEQ ID NO: 165 - DNA, 11 bp, Homo sapiens
taggcagacct

SEQ ID NO: 166 - DNA, 11 bp, Homo sapiens
gcctggccagg

SEQ ID NO: 167 - DNA, 11 bp, Homo sapiens
gtcatcttgtt

SEQ ID NO: 168 - DNA, 11 bp, Homo sapiens
ctcaacaacca

SEQ ID NO: 169 - DNA, 11 bp, Homo sapiens
ttatattaata

SEQ ID NO: 170 - DNA, 11 bp, Homo sapiens
gattaaacctt

SEQ ID NO: 171 - DNA, 11 bp, Homo sapiens
gatggaggtta

SEQ ID NO: 172 - DNA, 11 bp, Homo sapiens
tacaggcgtgg

SEQ ID NO: 173 - DNA, 11 bp, Homo sapiens
tgtgtgtgtat

SEQ ID NO: 174 - DNA, 11 bp, Homo sapiens
ggtgcctgtaa

SEQ ID NO: 175 - DNA, 11 bp, Homo sapiens
aagttgtggcc

SEQ ID NO: 176 - DNA, 11 bp, Homo sapiens
acaggagcgtt

SEQ ID NO: 177 - DNA, 11 bp, Homo sapiens
atgcctactct

SEQ ID NO: 178 - DNA, 11 bp, Homo sapiens
agcacaatctt

SEQ ID NO: 179 - DNA, 11 bp, Homo sapiens
gttctgtttgg

SEQ ID NO: 180 - DNA, 11 bp, Homo sapiens
ttgtgattata

SEQ ID NO: 181 - DNA, 11 bp, Homo sapiens
tatgcagatca

SEQ ID NO: 182 - DNA, 11 bp, Homo sapiens
gttgaggacat

SEQ ID NO: 183 - DNA, 11 bp, Homo sapiens
gccagtggctg

SEQ ID NO: 184 - DNA, 11 bp, Homo sapiens
gcagatctttc

SEQ ID NO: 185 - DNA, 11 bp, Homo sapiens
ttgaaacttct

SEQ ID NO: 186 - DNA, 11 bp, Homo sapiens
caaaaagttga

SEQ ID NO: 187 - DNA, 11 bp, Homo sapiens
ctccattctca

SEQ ID NO: 188 - DNA, 11 bp, Homo sapiens
gccacagctgg

SEQ ID NO: 189 - DNA, 11 bp, Homo sapiens
gggaaagaagg

SEQ ID NO: 190 - DNA, 11 bp, Homo sapiens
caaaagaataa

SEQ ID NO: 191 - DNA, 11 bp, Homo sapiens
taacagtaata

SEQ ID NO: 192 - DNA, 11 bp, Homo sapiens
tgcctaggaaa

SEQ ID NO: 193 - DNA, 11 bp, Homo sapiens
ccctaggagac

SEQ ID NO: 194 - DNA, 11 bp, Homo sapiens
gggttgttgta

SEQ ID NO: 195 - DNA, 11 bp, Homo sapiens
aacccccaaac

SEQ ID NO: 196 - DNA, 11 bp, Homo sapiens
cttttttcttt

SEQ ID NO: 197 - DNA, 11 bp, Homo sapiens
tgggaattgtg

SEQ ID NO: 198 - DNA, 11 bp, Homo sapiens
cattccagcct

SEQ ID NO: 199 - DNA, 11 bp, Homo sapiens
gctggagtgca

SEQ ID NO: 200 - DNA, 11 bp, Homo sapiens
gaaggccagct

SEQ ID NO: 201 - DNA, 11 bp, Homo sapiens
acgtatttgag

SEQ ID NO: 202 - DNA, 11 bp, Homo sapiens
taatttaaacc

SEQ ID NO: 203 - DNA, 11 bp, Homo sapiens
ctaaatgtgaa

SEQ ID NO: 204 - DNA, 11 bp, Homo sapiens
cctggctctaa

SEQ ID NO: 205 - DNA, 11 bp, Homo sapiens
ctgtccttgtt

SEQ ID NO: 206 - DNA, 11 bp, Homo sapiens
caatatttgag

SEQ ID NO: 207 - DNA, 11 bp, Homo sapiens
caatggatggc

SEQ ID NO: 208 - DNA, 11 bp, Homo sapiens
gtccttgacca

SEQ ID NO: 209 - DNA, 11 bp, Homo sapiens
gcaatgacctg

SEQ ID NO: 210 - DNA, 11 bp, Homo sapiens
tcctaattcag

SEQ ID NO: 211 - DNA, 11 bp, Homo sapiens
ttaatgatctt

SEQ ID NO: 212 - DNA, 11 bp, Homo sapiens
ttaagtgttct

SEQ ID NO: 213 - DNA, 11 bp, Homo sapiens
tgaagcgttta

SEQ ID NO: 214 - DNA, 11 bp, Homo sapiens
gtggagcttaa

SEQ ID NO: 215 - DNA, 11 bp, Homo sapiens
gagactggggc

SEQ ID NO: 216 - DNA, 11 bp, Homo sapiens
gtggtactcgc

SEQ ID NO: 217 - DNA, 11 bp, Homo sapiens
tgcagtgcttg

SEQ ID NO: 218 - DNA, 11 bp, Homo sapiens
agcttattggc

SEQ ID NO: 219 - DNA, 11 bp, Homo sapiens
acttctgctta

SEQ ID NO: 220 - DNA, 11 bp, Homo sapiens
gatagaaattt

SEQ ID NO: 221 - DNA, 11 bp, Homo sapiens
tttgactaatt

SEQ ID NO: 222 - DNA, 11 bp, Homo sapiens
tcaaaatgaca

SEQ ID NO: 223 - DNA, 11 bp, Homo sapiens
ccagctagttt

SEQ ID NO: 224 - DNA, 11 bp, Homo sapiens
tagaggagttg

SEQ ID NO: 225 - DNA, 11 bp, Homo sapiens
gggaaacacca

SEQ ID NO: 226 - DNA, 11 bp, Homo sapiens
gaaatgagtgt

SEQ ID NO: 227 - DNA, 11 bp, Homo sapiens
atcttggtact

SEQ ID NO: 228 - DNA, 11 bp, Homo sapiens
catatcatctc

SEQ ID NO: 229 - DNA, 11 bp, Homo sapiens
atgtgactttt

SEQ ID NO: 230 - DNA, 11 bp, Homo sapiens
ccactgtaagc

SEQ ID NO: 231 - DNA, 11 bp, Homo sapiens
tataaggctga

SEQ ID NO: 232 - DNA, 11 bp, Homo sapiens
gccactgccac

SEQ ID NO: 233 - DNA, 11 bp, Homo sapiens
tgaggccaggg

SEQ ID NO: 234 - DNA, 11 bp, Homo sapiens
gtttatttgaa

SEQ ID NO: 235 - DNA, 11 bp, Homo sapiens
aaaattgttag

SEQ ID NO: 236 - DNA, 11 bp, Homo sapiens
gtgatgggctc

SEQ ID NO: 237 - DNA, 11 bp, Homo sapiens
aggctcctggc

SEQ ID NO: 238 - DNA, 11 bp, Homo sapiens
aacagcaagga

SEQ ID NO: 239 - DNA, 11 bp, Homo sapiens
ccacgggattc

SEQ ID NO: 240 - DNA, 11 bp, Homo sapiens
gatttcgtttt

SEQ ID NO: 241 - DNA, 11 bp, Homo sapiens
tatagccctca

SEQ ID NO: 242 - DNA, 11 bp, Homo sapiens
gtgacacgtgc

SEQ ID NO: 243 - DNA, 11 bp, Homo sapiens
agctgtcgtag

SEQ ID NO: 244 - DNA, 11 bp, Homo sapiens
attgtttcaag

SEQ ID NO: 245 - DNA, 11 bp, Homo sapiens
agaccctgtct

SEQ ID NO: 246 - DNA, 11 bp, Homo sapiens
ttggcaaggct

SEQ ID NO: 247 - DNA, 11 bp, Homo sapiens
atcatagctca

SEQ ID NO: 248 - DNA, 11 bp, Homo sapiens
cctaccaccat

SEQ ID NO: 249 - DNA, 11 bp, Homo sapiens
ccagggcaaca

SEQ ID NO: 250 - DNA, 11 bp, Homo sapiens
tacagtatttt

SEQ ID NO: 251 - DNA, 11 bp, Homo sapiens
tgccaggtgca

SEQ ID NO: 252 - DNA, 11 bp, Homo sapiens
ttttttattcc

SEQ ID NO: 253 - DNA, 11 bp, Homo sapiens
aatatttttat

SEQ ID NO: 254 - DNA, 11 bp, Homo sapiens
gagaaccacct

SEQ ID NO: 255 - DNA, 11 bp, Homo sapiens
gacacaccgaa

SEQ ID NO: 256 - DNA, 11 bp, Homo sapiens
ggcttgtctat

SEQ ID NO: 257 - DNA, 11 bp, Homo sapiens
ggcaatatagt

SEQ ID NO: 258 - DNA, 11 bp, Homo sapiens
aggataacttc

SEQ ID NO: 259 - DNA, 11 bp, Homo sapiens
gatcaatcagt

SEQ ID NO: 260 - DNA, 11 bp, Homo sapiens
ttgaatattaa

SEQ ID NO: 261 - DNA, 11 bp, Homo sapiens
tcctcacttca

SEQ ID NO: 262 - DNA, 11 bp, Homo sapiens
gttgcagcatt

SEQ ID NO: 263 - DNA, 11 bp, Homo sapiens
gtgtctgtctc

SEQ ID NO: 264 - DNA, 11 bp, Homo sapiens
ggcctctccga

SEQ ID NO: 265 - DNA, 11 bp, Homo sapiens
acagaatgcct

SEQ ID NO: 266 - DNA, 11 bp, Homo sapiens
ggggctgccca

SEQ ID NO: 267 - DNA, 11 bp, Homo sapiens
aaaatcgcttg

SEQ ID NO: 268 - DNA, 11 bp, Homo sapiens
gtataaacgtc

SEQ ID NO: 269 - DNA, 11 bp, Homo sapiens
cactttaccag

SEQ ID NO: 270 - DNA, 11 bp, Homo sapiens
ttaattacagt

SEQ ID NO: 271 - DNA, 11 bp, Homo sapiens
tcagcgaccct

SEQ ID NO: 272 - DNA, 11 bp, Homo sapiens
atggcacattc

SEQ ID NO: 273 - DNA, 11 bp, Homo sapiens
aggctcaggtc

SEQ ID NO: 274 - DNA, 11 bp, Homo sapiens
aacaggggcca

SEQ ID NO: 275 - DNA, 11 bp, Homo sapiens
ctgaaatctat

SEQ ID NO: 276 - DNA, 11 bp, Homo sapiens
gagaaatcccg

SEQ ID NO: 277 - DNA, 11 bp, Homo sapiens
tcaaaagacct

SEQ ID NO: 278 - DNA, 11 bp, Homo sapiens
gaaaacaaaca

SEQ ID NO: 279 - DNA, 11 bp, Homo sapiens
tgcatctgtac

SEQ ID NO: 280 - DNA, 11 bp, Homo sapiens
atgaaactcca

SEQ ID NO: 281 - DNA, 11 bp, Homo sapiens
tttattcctct

SEQ ID NO: 282 - DNA, 11 bp, Homo sapiens
gggagacctgt

SEQ ID NO: 283 - DNA, 11 bp, Homo sapiens
cactatgtaaa

SEQ ID NO: 284 - DNA, 11 bp, Homo sapiens
tacagcggcag

SEQ ID NO: 285 - DNA, 11 bp, Homo sapiens
agtgccttggg

SEQ ID NO: 286 - DNA, 11 bp, Homo sapiens
cgatgctgacg

SEQ ID NO: 287 - DNA, 11 bp, Homo sapiens
gtggtgtaatc

SEQ ID NO: 288 - DNA, 11 bp, Homo sapiens
tatcccagaat

SEQ ID NO: 289 - DNA, 11 bp, Homo sapiens
tctaaaaaggc

SEQ ID NO: 290 - DNA, 11 bp, Homo sapiens
tcgaaacgctg

SEQ ID NO: 291 - DNA, 11 bp, Homo sapiens
acattcttttt

SEQ ID NO: 292 - DNA, 11 bp, Homo sapiens
ctgtttgttca

SEQ ID NO: 293 - DNA, 11 bp, Homo sapiens
cagtactgtat

SEQ ID NO: 294 - DNA, 11 bp, Homo sapiens
ggtgaaacccc

SEQ ID NO: 295 - DNA, 11 bp, Homo sapiens
gccaaacccca

SEQ ID NO: 296 - DNA, 11 bp, Homo sapiens
gccgacgccag

SEQ ID NO: 297 - DNA, 11 bp, Homo sapiens
gaagaggacaa

SEQ ID NO: 298 - DNA, 11 bp, Homo sapiens
taaataagaaa

SEQ ID NO: 299 - DNA, 11 bp, Homo sapiens
aaagatccctc

SEQ ID NO: 300 - DNA, 11 bp, Homo sapiens
atcaaaggtta

SEQ ID NO: 301 - DNA, 11 bp, Homo sapiens
gcaaggttggt

SEQ ID NO: 302 - DNA, 11 bp, Homo sapiens
gggacaaaaaa

SEQ ID NO: 303 - DNA, 11 bp, Homo sapiens
actacctctga

SEQ ID NO: 304 - DNA, 11 bp, Homo sapiens
gctgggcccag

SEQ ID NO: 305 - DNA, 11 bp, Homo sapiens
caaagaaatag

SEQ ID NO: 306 - DNA, 11 bp, Homo sapiens
aatacaagtat

SEQ ID NO: 307 - DNA, 11 bp, Homo sapiens
ctctgtggctc

SEQ ID NO: 308 - DNA, 11 bp, Homo sapiens
tatttgaaagt

SEQ ID NO: 309 - DNA, 11 bp, Homo sapiens
cccgcctccgt

SEQ ID NO: 310 - DNA, 11 bp, Homo sapiens
tcaccgtagcc

SEQ ID NO: 311 - DNA, 11 bp, Homo sapiens
ccaaaaattaa

SEQ ID NO: 312 - DNA, 11 bp, Homo sapiens
actcgtatatg

SEQ ID NO: 313 - DNA, 11 bp, Homo sapiens
tcaagatgaag

SEQ ID NO: 314 - DNA, 11 bp, Homo sapiens
cgtctatccat

SEQ ID NO: 315 - DNA, 11 bp, Homo sapiens
aaagtgaaatg

SEQ ID NO: 316 - DNA, 11 bp, Homo sapiens
ttctggtgctg

SEQ ID NO: 317 - DNA, 11 bp, Homo sapiens
ctggcgtcgtc

SEQ ID NO: 318 - DNA, 11 bp, Homo sapiens
ggctggggagg

SEQ ID NO: 319 - DNA, 11 bp, Homo sapiens
tgcccccaaaa

SEQ ID NO: 320 - DNA, 11 bp, Homo sapiens
tttattgaaca

SEQ ID NO: 321 - DNA, 11 bp, Homo sapiens
ctttcctcatt

SEQ ID NO: 322 - DNA, 11 bp, Homo sapiens
ttggactgagg

SEQ ID NO: 323 - DNA, 11 bp, Homo sapiens
agcattaaaaa

SEQ ID NO: 324 - DNA, 11 bp, Homo sapiens
ctgctttaaaa

SEQ ID NO: 325 - DNA, 11 bp, Homo sapiens
tgcttaaaaat

SEQ ID NO: 326 - DNA, 11 bp, Homo sapiens
atgaaccccct

SEQ ID NO: 327 - DNA, 11 bp, Homo sapiens
tgaaacttccc

SEQ ID NO: 328 - DNA, 11 bp, Homo sapiens
caaacaaaaaa

SEQ ID NO: 329 - DNA, 11 bp, Homo sapiens
gaggtaactac

SEQ ID NO: 330 - DNA, 11 bp, Homo sapiens
cattaaaaaat

SEQ ID NO: 331 - DNA, 11 bp, Homo sapiens
caatggtgaaa

SEQ ID NO: 332 - DNA, 11 bp, Homo sapiens
ctaatgaatgt

SEQ ID NO: 333 - DNA, 11 bp, Homo sapiens
agggctttcac

SEQ ID NO: 334 - DNA, 11 bp, Homo sapiens
taaccgtggaa

SEQ ID NO: 335 - DNA, 11 bp, Homo sapiens
tctcccacacc

SEQ ID NO: 336 - DNA, 11 bp, Homo sapiens
cctggatctcc

SEQ ID NO: 337 - DNA, 11 bp, Homo sapiens
ggcctggcact

SEQ ID NO: 338 - DNA, 11 bp, Homo sapiens
actttgttttt

SEQ ID NO: 339 - DNA, 11 bp, Homo sapiens
gtgacgcctgt

SEQ ID NO: 340 - DNA, 11 bp, Homo sapiens
ccataagtcct

SEQ ID NO: 341 - DNA, 11 bp, Homo sapiens
agcccccgcgc

SEQ ID NO: 342 - DNA, 11 bp, Homo sapiens
tatcatcattc

SEQ ID NO: 343 - DNA, 11 bp, Homo sapiens
ttccctgagca

SEQ ID NO: 344 - DNA, 11 bp, Homo sapiens
tagtctaaggc

SEQ ID NO: 345 - DNA, 11 bp, Homo sapiens
atagtagtaat

SEQ ID NO: 346 - DNA, 11 bp, Homo sapiens
gattttaaatg

SEQ ID NO: 347 - DNA, 11 bp, Homo sapiens
cctggctaaca

SEQ ID NO: 348 - DNA, 11 bp, Homo sapiens
ctgtacagacc

SEQ ID NO: 349 - DNA, 11 bp, Homo sapiens
ggcaccagagc

SEQ ID NO: 350 - DNA, 11 bp, Homo sapiens
gcgaactccgt

SEQ ID NO: 351 - DNA, 11 bp, Homo sapiens
cgcgtccgtgt

SEQ ID NO: 352 - DNA, 11 bp, Homo sapiens
gttttggttta

SEQ ID NO: 353 - DNA, 11 bp, Homo sapiens
ctttttgccac

SEQ ID NO: 354 - DNA, 11 bp, Homo sapiens
gtggggggcgc

SEQ ID NO: 355 - DNA, 11 bp, Homo sapiens
tctttccaact

SEQ ID NO: 356 - DNA, 11 bp, Homo sapiens
tagtagggctc

SEQ ID NO: 357 - DNA, 11 bp, Homo sapiens
aggacataaca

SEQ ID NO: 358 - DNA, 11 bp, Homo sapiens
ttgttttaaga

SEQ ID NO: 359 - DNA, 11 bp, Homo sapiens
gtggcacatct

SEQ ID NO: 360 - DNA, 11 bp, Homo sapiens
cacattgaggc

SEQ ID NO: 361 - DNA, 11 bp, Homo sapiens
aggctagcact

SEQ ID NO: 362 - DNA, 11 bp, Homo sapiens
cccctgccctc

SEQ ID NO: 363 - DNA, 11 bp, Homo sapiens
ttgtctcttga

SEQ ID NO: 364 - DNA, 11 bp, Homo sapiens
tgggtacactg

SEQ ID NO: 365 - DNA, 11 bp, Homo sapiens
ggcagtggtaa

SEQ ID NO: 366 - DNA, 11 bp, Homo sapiens
cataaatgtta

SEQ ID NO: 367 - DNA, 11 bp, Homo sapiens
agattacccac

SEQ ID NO: 368 - DNA, 11 bp, Homo sapiens
actggctcagg

SEQ ID NO: 369 - DNA, 11 bp, Homo sapiens
cttgtagtctc

SEQ ID NO: 370 - DNA, 11 bp, Homo sapiens
agcccagctgg

SEQ ID NO: 371 - DNA, 11 bp, Homo sapiens
gagggcaatct

SEQ ID NO: 372 - DNA, 11 bp, Homo sapiens
ctgaaacagga

SEQ ID NO: 373 - DNA, 11 bp, Homo sapiens
gccctacctgc

SEQ ID NO: 374 - DNA, 11 bp, Homo sapiens
gccaacggcgt

SEQ ID NO: 375 - DNA, 11 bp, Homo sapiens
gtaaagatgaa

SEQ ID NO: 376 - DNA, 11 bp, Homo sapiens
ggggtaatttt

SEQ ID NO: 377 - DNA, 11 bp, Homo sapiens
aggacaatgaa

SEQ ID NO: 378 - DNA, 11 bp, Homo sapiens
tttgcactttt

SEQ ID NO: 379 - DNA, 11 bp, Homo sapiens
ctgaagtgcag

SEQ ID NO: 380 - DNA, 11 bp, Homo sapiens
cccattcagtc

SEQ ID NO: 381 - DNA, 11 bp, Homo sapiens
taatgttctca

SEQ ID NO: 382 - DNA, 11 bp, Homo sapiens
gtttctgcaga

SEQ ID NO: 383 - DNA, 11 bp, Homo sapiens
gcagattctca

SEQ ID NO: 384 - DNA, 11 bp, Homo sapiens
ggaatgagggg

SEQ ID NO: 385 - DNA, 11 bp, Homo sapiens
gagaggaacta

SEQ ID NO: 386 - DNA, 11 bp, Homo sapiens
ttcgacaggct

SEQ ID NO: 387 - DNA, 11 bp, Homo sapiens
ctccagcctgg

SEQ ID NO: 388 - DNA, 11 bp, Homo sapiens
agtctgtattt

SEQ ID NO: 389 - DNA, 11 bp, Homo sapiens
gagtattattt

SEQ ID NO: 390 - DNA, 11 bp, Homo sapiens
tactgtactcc

SEQ ID NO: 391 - DNA, 11 bp, Homo sapiens
aaaataaaatg

SEQ ID NO: 392 - DNA, 11 bp, Homo sapiens
cccaggagttt

SEQ ID NO: 393 - DNA, 11 bp, Homo sapiens
aaaatacagtg

SEQ ID NO: 394 - DNA, 11 bp, Homo sapiens
catttggccgg

SEQ ID NO: 395 - DNA, 11 bp, Homo sapiens
caggacctgaa

SEQ ID NO: 396 - DNA, 11 bp, Homo sapiens
tcattaacaaa

SEQ ID NO: 397 - DNA, 11 bp, Homo sapiens
cagtaggataa

SEQ ID NO: 398 - DNA, 11 bp, Homo sapiens
gcctcacctgg

SEQ ID NO: 399 - DNA, 11 bp, Homo sapiens
tctgtatcaaa

SEQ ID NO: 400 - DNA, 11 bp, Homo sapiens
tgatttgtgaa

SEQ ID NO: 401 - DNA, 11 bp, Homo sapiens
aggatattgga

SEQ ID NO: 402 - DNA, 11 bp, Homo sapiens
gtggtacacag

SEQ ID NO: 403 - DNA, 11 bp, Homo sapiens
ttggccagatt

SEQ ID NO: 404 - DNA, 11 bp, Homo sapiens
attcttgtaca

SEQ ID NO: 405 - DNA, 11 bp, Homo sapiens
ccttcttgggg

SEQ ID NO: 406 - DNA, 11 bp, Homo sapiens
tactggaaggc

SEQ ID NO: 407 - DNA, 11 bp, Homo sapiens
gtggtggttgg

SEQ ID NO: 408 - DNA, 11 bp, Homo sapiens
agtaatgaaaa

SEQ ID NO: 409 - DNA, 11 bp, Homo sapiens
ttagttttgct

SEQ ID NO: 410 - DNA, 11 bp, Homo sapiens
gctaatatatt

SEQ ID NO: 411 - DNA, 11 bp, Homo sapiens
tcttgactccc

SEQ ID NO: 412 - DNA, 11 bp, Homo sapiens
tgtacttaatt

SEQ ID NO: 413 - DNA, 11 bp, Homo sapiens
ctcagcaggag

SEQ ID NO: 414 - DNA, 11 bp, Homo sapiens
ggtacaatccg

SEQ ID NO: 415 - DNA, 11 bp, Homo sapiens
actccagacct

SEQ ID NO: 416 - DNA, 11 bp, Homo sapiens
gagaaactccg

SEQ ID NO: 417 - DNA, 11 bp, Homo sapiens
cccagagaccc

SEQ ID NO: 418 - DNA, 11 bp, Homo sapiens
gcaagaaagtg

SEQ ID NO: 419 - DNA, 11 bp, Homo sapiens
aaacaataaaa

SEQ ID NO: 420 - DNA, 11 bp, Homo sapiens
cgtgggacact

SEQ ID NO: 421 - DNA, 11 bp, Homo sapiens
ctgttctcttg

SEQ ID NO: 422 - DNA, 11 bp, Homo sapiens
tagttggaaaa

SEQ ID NO: 423 - DNA, 11 bp, Homo sapiens
gtgaaagcctg

SEQ ID NO: 424 - DNA, 11 bp, Homo sapiens
ttggtttgctg

SEQ ID NO: 425 - DNA, 11 bp, Homo sapiens
cctgtaattca

SEQ ID NO: 426 - DNA, 11 bp, Homo sapiens
aaaccccgtct

SEQ ID NO: 427 - DNA, 11 bp, Homo sapiens
atcgcactact

SEQ ID NO: 428 - DNA, 11 bp, Homo sapiens
ttgagggggtg

SEQ ID NO: 429 - DNA, 11 bp, Homo sapiens
tttggttttcc

SEQ ID NO: 430 - DNA, 11 bp, Homo sapiens
acaaaaccccg

SEQ ID NO: 431 - DNA, 11 bp, Homo sapiens
gtgctcaatag

SEQ ID NO: 432 - DNA, 11 bp, Homo sapiens
caaccagtaaa

SEQ ID NO: 433 - DNA, 11 bp, Homo sapiens
agtttatgccc

SEQ ID NO: 434 - DNA, 11 bp, Homo sapiens
ttcacattgtc

SEQ ID NO: 435 - DNA, 11 bp, Homo sapiens
cctggcctaga

SEQ ID NO: 436 - DNA, 11 bp, Homo sapiens
aaactgggagg

SEQ ID NO: 437 - DNA, 11 bp, Homo sapiens
gcccgccttct

SEQ ID NO: 438 - DNA, 11 bp, Homo sapiens
tgcaggtttgt

SEQ ID NO: 439 - DNA, 11 bp, Homo sapiens
ctcaacttgta

SEQ ID NO: 440 - DNA, 11 bp, Homo sapiens
tttgcttttgt

SEQ ID NO: 441 - DNA, 11 bp, Homo sapiens
taaatgaaaaa

SEQ ID NO: 442 - DNA, 11 bp, Homo sapiens
gcccccttcct

SEQ ID NO: 443 - DNA, 11 bp, Homo sapiens
cctgtaattgc

SEQ ID NO: 444 - DNA, 11 bp, Homo sapiens
tcaccctccag

SEQ ID NO: 445 - DNA, 11 bp, Homo sapiens
aagctctgtgt

SEQ ID NO: 446 - DNA, 11 bp, Homo sapiens
atggtgggcgc

SEQ ID NO: 447 - DNA, 11 bp, Homo sapiens
cctgtagttct

SEQ ID NO: 448 - DNA, 11 bp, Homo sapiens
catctgtaatc

SEQ ID NO: 449 - DNA, 11 bp, Homo sapiens
tctataatccc

SEQ ID NO: 450 - DNA, 11 bp, Homo sapiens
atggcacgtgc

SEQ ID NO: 451 - DNA, 11 bp, Homo sapiens
ctggtgcactg

SEQ ID NO: 452 - DNA, 11 bp, Homo sapiens
ataaaaagaaa

SEQ ID NO: 453 - DNA, 11 bp, Homo sapiens
cacttgtagtc

SEQ ID NO: 454 - DNA, 11 bp, Homo sapiens
atttggagagg

SEQ ID NO: 455 - DNA, 11 bp, Homo sapiens
cagcagcttgt

SEQ ID NO: 456 - DNA, 11 bp, Homo sapiens
gtattttcata

SEQ ID NO: 457 - DNA, 11 bp, Homo sapiens
cttgttgcaat

SEQ ID NO: 458 - DNA, 11 bp, Homo sapiens
cagggtgggtg

SEQ ID NO: 459 - DNA, 11 bp, Homo sapiens
agccactacgc

SEQ ID NO: 460 - DNA, 11 bp, Homo sapiens
tggcataatca

SEQ ID NO: 461 - DNA, 11 bp, Homo sapiens
ccttcctctcc

SEQ ID NO: 462 - DNA, 11 bp, Homo sapiens
ccctgaatgaa

SEQ ID NO: 463 - DNA, 11 bp, Homo sapiens
gattagcacca

SEQ ID NO: 464 - DNA, 11 bp, Homo sapiens
gccgtgaaaaa

SEQ ID NO: 465 - DNA, 11 bp, Homo sapiens
agaaagaagga

SEQ ID NO: 466 - DNA, 11 bp, Homo sapiens
gcttcctcctc

SEQ ID NO: 467 - DNA, 11 bp, Homo sapiens
tttcttccctt

SEQ ID NO: 468 - DNA, 11 bp, Homo sapiens
tgcctgtagtc

SEQ ID NO: 469 - DNA, 11 bp, Homo sapiens
ccctcaatccc

SEQ ID NO: 470 - DNA, 11 bp, Homo sapiens
acaacttttat

SEQ ID NO: 471 - DNA, 11 bp, Homo sapiens
gcaaacctaaa

SEQ ID NO: 472 - DNA, 11 bp, Homo sapiens
gagtgcaaccc

SEQ ID NO: 473 - DNA, 11 bp, Homo sapiens
ttgaatagtga

SEQ ID NO: 474 - DNA, 11 bp, Homo sapiens
agccggatgct

SEQ ID NO: 475 - DNA, 11 bp, Homo sapiens
gcaaaacactg

SEQ ID NO: 476 - DNA, 11 bp, Homo sapiens
catttgggaag

SEQ ID NO: 477 - DNA, 11 bp, Homo sapiens
caagagatgct

SEQ ID NO: 478 - DNA, 11 bp, Homo sapiens
agtttatttca

SEQ ID NO: 479 - DNA, 11 bp, Homo sapiens
gaggatctgcg

SEQ ID NO: 480 - DNA, 11 bp, Homo sapiens
actctggctca

SEQ ID NO: 481 - DNA, 11 bp, Homo sapiens
ggggttagggg

SEQ ID NO: 482 - DNA, 11 bp, Homo sapiens
taatatatctg

SEQ ID NO: 483 - DNA, 11 bp, Homo sapiens
taagtctatat

SEQ ID NO: 484 - DNA, 11 bp, Homo sapiens
cacaaaaggat

SEQ ID NO: 485 - DNA, 11 bp, Homo sapiens
gagaaaccctt

SEQ ID NO: 486 - DNA, 11 bp, Homo sapiens
gaaaacagtaa

SEQ ID NO: 487 - DNA, 11 bp, Homo sapiens
ggcaatttact

SEQ ID NO: 488 - DNA, 11 bp, Homo sapiens
ttttgtgctag

SEQ ID NO: 489 - DNA, 11 bp, Homo sapiens
ttcccgtggct

SEQ ID NO: 490 - DNA, 11 bp, Homo sapiens
ggcccaggcct

SEQ ID NO: 491 - DNA, 11 bp, Homo sapiens
cggccacgtat

SEQ ID NO: 492 - DNA, 11 bp, Homo sapiens
tatagctgcat

SEQ ID NO: 493 - DNA, 11 bp, Homo sapiens
cttgtgtttat

SEQ ID NO: 494 - DNA, 11 bp, Homo sapiens
cacaaaaatgc

SEQ ID NO: 495 - DNA, 11 bp, Homo sapiens
ctgtaatttta

SEQ ID NO: 496 - DNA, 11 bp, Homo sapiens
caattctttct

SEQ ID NO: 497 - DNA, 11 bp, Homo sapiens
attctgcagag

SEQ ID NO: 498 - DNA, 11 bp, Homo sapiens
tttatatcatt

SEQ ID NO: 499 - DNA, 11 bp, Homo sapiens
actccataaaa

SEQ ID NO: 500 - DNA, 11 bp, Homo sapiens
ttttcattata

SEQ ID NO: 501 - DNA, 11 bp, Homo sapiens
gactcgaccag

SEQ ID NO: 502 - DNA, 11 bp, Homo sapiens
ggtgtgtttta

SEQ ID NO: 503 - DNA, 11 bp, Homo sapiens
ataaatttatg

SEQ ID NO: 504 - DNA, 11 bp, Homo sapiens
ggaggccgaga

SEQ ID NO: 505 - DNA, 11 bp, Homo sapiens
atattcagctg

SEQ ID NO: 506 - DNA, 11 bp, Homo sapiens
gaacttgtctg

SEQ ID NO: 507 - DNA, 11 bp, Homo sapiens
cccgtatatgt

SEQ ID NO: 508 - DNA, 11 bp, Homo sapiens
gtggacctgag

SEQ ID NO: 509 - DNA, 11 bp, Homo sapiens
agcctggaagg

SEQ ID NO: 510 - DNA, 11 bp, Homo sapiens
tggtttttgag

SEQ ID NO: 511 - DNA, 11 bp, Homo sapiens
gcttgttcaaa

SEQ ID NO: 512 - DNA, 11 bp, Homo sapiens
tccaccagcca

SEQ ID NO: 513 - DNA, 11 bp, Homo sapiens
gcactccaacc

SEQ ID NO: 514 - DNA, 11 bp, Homo sapiens
cccataatcct

SEQ ID NO: 515 - DNA, 11 bp, Homo sapiens
agtcacagctt

SEQ ID NO: 516 - DNA, 11 bp, Homo sapiens
tagaaaaaacc

SEQ ID NO: 517 - DNA, 11 bp, Homo sapiens
taaagatggca

SEQ ID NO: 518 - DNA, 11 bp, Homo sapiens
ggctatgccct

SEQ ID NO: 519 - DNA, 11 bp, Homo sapiens
agacattgaca

SEQ ID NO: 520 - DNA, 11 bp, Homo sapiens
tatgctttaaa

SEQ ID NO: 521 - DNA, 11 bp, Homo sapiens
tattgctaaat

SEQ ID NO: 522 - DNA, 11 bp, Homo sapiens
ccaaggcactg

SEQ ID NO: 523 - DNA, 11 bp, Homo sapiens
aactttccaaa

SEQ ID NO: 524 - DNA, 11 bp, Homo sapiens
tctcacaaggg

SEQ ID NO: 525 - DNA, 11 bp, Homo sapiens
ccactatgcct

SEQ ID NO: 526 - DNA, 11 bp, Homo sapiens
gggcgcctggc

SEQ ID NO: 527 - DNA, 11 bp, Homo sapiens
ggggggaaaaa

SEQ ID NO: 528 - DNA, 11 bp, Homo sapiens
ttgtttatgta

SEQ ID NO: 529 - DNA, 11 bp, Homo sapiens
ttgagataaga

SEQ ID NO: 530 - DNA, 11 bp, Homo sapiens
gctatatccaa

SEQ ID NO: 531 - DNA, 11 bp, Homo sapiens
tttggttttct

SEQ ID NO: 532 - DNA, 11 bp, Homo sapiens
gattgtccttg

SEQ ID NO: 533 - DNA, 11 bp, Homo sapiens
ggttatcaaag

SEQ ID NO: 534 - DNA, 11 bp, Homo sapiens
gtctcgctgac

SEQ ID NO: 535 - DNA, 11 bp, Homo sapiens
agccatcgcgc

SEQ ID NO: 536 - DNA, 11 bp, Homo sapiens
accacccgtgt

SEQ ID NO: 537 - DNA, 11 bp, Homo sapiens
acactcttcct

SEQ ID NO: 538 - DNA, 11 bp, Homo sapiens
ggagatgtttg

SEQ ID NO: 539 - DNA, 11 bp, Homo sapiens
ctcaaccttaa

SEQ ID NO: 540 - DNA, 11 bp, Homo sapiens
gcaagactccc

SEQ ID NO: 541 - DNA, 11 bp, Homo sapiens
caatactattc

SEQ ID NO: 542 - DNA, 11 bp, Homo sapiens
gttgtgctcag

SEQ ID NO: 543 - DNA, 11 bp, Homo sapiens
gggctagcact

SEQ ID NO: 544 - DNA, 11 bp, Homo sapiens
acattcacgcc

SEQ ID NO: 545 - DNA, 11 bp, Homo sapiens
tatatttagtt

SEQ ID NO: 546 - DNA, 11 bp, Homo sapiens
ccagctagcga

SEQ ID NO: 547 - DNA, 11 bp, Homo sapiens
tgaggatacag

SEQ ID NO: 548 - DNA, 11 bp, Homo sapiens
tgcctacagtc

SEQ ID NO: 549 - DNA, 11 bp, Homo sapiens
ctcatatgcaa

SEQ ID NO: 550 - DNA, 11 bp, Homo sapiens
aaggaggtgga

SEQ ID NO: 551 - DNA, 11 bp, Homo sapiens
caagccctgcc

SEQ ID NO: 552 - DNA, 11 bp, Homo sapiens
gcgctgggagg

SEQ ID NO: 553 - DNA, 11 bp, Homo sapiens
tccttggcgtg

SEQ ID NO: 554 - DNA, 11 bp, Homo sapiens
ttgccatatgc

SEQ ID NO: 555 - DNA, 11 bp, Homo sapiens
gctcccttcac

SEQ ID NO: 556 - DNA, 11 bp, Homo sapiens
ctgtgcaagga

SEQ ID NO: 557 - DNA, 11 bp, Homo sapiens
tgtgcttgtgt

SEQ ID NO: 558 - DNA, 11 bp, Homo sapiens
ctttttccccc

SEQ ID NO: 559 - DNA, 11 bp, Homo sapiens
tctttttcttt

SEQ ID NO: 560 - DNA, 11 bp, Homo sapiens
aaaagctgttt

SEQ ID NO: 561 - DNA, 11 bp, Homo sapiens
gtccccccccc

SEQ ID NO: 562 - DNA, 11 bp, Homo sapiens
cctggcgggat

SEQ ID NO: 563 - DNA, 11 bp, Homo sapiens
gattggtatga

SEQ ID NO: 564 - DNA, 11 bp, Homo sapiens
gtgaagactac

SEQ ID NO: 565 - DNA, 11 bp, Homo sapiens
taaatgggttg

SEQ ID NO: 566 - DNA, 11 bp, Homo sapiens
tgtaaactttg

SEQ ID NO: 567 - DNA, 11 bp, Homo sapiens
gacacgttgcc

SEQ ID NO: 568 - DNA, 11 bp, Homo sapiens
tgtgaatttta

SEQ ID NO: 569 - DNA, 11 bp, Homo sapiens
taaaacacttg

SEQ ID NO: 570 - DNA, 11 bp, Homo sapiens
tggcaattttc

SEQ ID NO: 571 - DNA, 11 bp, Homo sapiens
tctgtagcaca

SEQ ID NO: 572 - DNA, 11 bp, Homo sapiens
tcagcagttaa

SEQ ID NO: 573 - DNA, 11 bp, Homo sapiens
aatgaggtgct

SEQ ID NO: 574 - DNA, 11 bp, Homo sapiens
ttcagaatctt

SEQ ID NO: 575 - DNA, 11 bp, Homo sapiens
gaataagatat

SEQ ID NO: 576 - DNA, 11 bp, Homo sapiens
tgtcccagcca

SEQ ID NO: 577 - DNA, 11 bp, Homo sapiens
cccatctcaga

SEQ ID NO: 578 - DNA, 11 bp, Homo sapiens
agaagctccag

SEQ ID NO: 579 - DNA, 11 bp, Homo sapiens
agtcttcaaaa

SEQ ID NO: 580 - DNA, 11 bp, Homo sapiens
gagttttcatt

SEQ ID NO: 581 - DNA, 11 bp, Homo sapiens
ttttgcaataa

SEQ ID NO: 582 - DNA, 11 bp, Homo sapiens
agctctatgag

SEQ ID NO: 583 - DNA, 11 bp, Homo sapiens
aataggtccca

SEQ ID NO: 584 - DNA, 11 bp, Homo sapiens
tagtctactgt

SEQ ID NO: 585 - DNA, 11 bp, Homo sapiens
atccttacatc

SEQ ID NO: 586 - DNA, 11 bp, Homo sapiens
aactttcatat

SEQ ID NO: 587 - DNA, 11 bp, Homo sapiens
ccgtaaaaaaa

SEQ ID NO: 588 - DNA, 11 bp, Homo sapiens
tgaagatgtaa

SEQ ID NO: 589 - DNA, 11 bp, Homo sapiens
gaaccatttgc

SEQ ID NO: 590 - DNA, 11 bp, Homo sapiens
ctgtggagctg

SEQ ID NO: 591 - DNA, 11 bp, Homo sapiens
agaattacaga

SEQ ID NO: 592 - DNA, 11 bp, Homo sapiens
tgttgctccca

SEQ ID NO: 593 - DNA, 11 bp, Homo sapiens
tagtttgaagg

SEQ ID NO: 594 - DNA, 11 bp, Homo sapiens
cccaacgcgct

SEQ ID NO: 595 - DNA, 11 bp, Homo sapiens
cctataatctc

SEQ ID NO: 596 - DNA, 11 bp, Homo sapiens
tctcctggact

SEQ ID NO: 597 - DNA, 11 bp, Homo sapiens
atcttgccact

SEQ ID NO: 598 - DNA, 11 bp, Homo sapiens
aggataaaaaa

SEQ ID NO: 599 - DNA, 11 bp, Homo sapiens
gaccacaaata

SEQ ID NO: 600 - DNA, 11 bp, Homo sapiens
agcatatcttc

SEQ ID NO: 601 - DNA, 11 bp, Homo sapiens
aacacaggagg

SEQ ID NO: 602 - DNA, 11 bp, Homo sapiens
cggggacgagg

SEQ ID NO: 603 - DNA, 11 bp, Homo sapiens
gcgaagccccg

SEQ ID NO: 604 - DNA, 11 bp, Homo sapiens
gtggcaggtac

SEQ ID NO: 605 - DNA, 11 bp, Homo sapiens
tctgttgttca

SEQ ID NO: 606 - DNA, 11 bp, Homo sapiens
cctgtatccca

SEQ ID NO: 607 - DNA, 11 bp, Homo sapiens
atggatgcttg

SEQ ID NO: 608 - DNA, 11 bp, Homo sapiens
gacttctgtcc

SEQ ID NO: 609 - DNA, 11 bp, Homo sapiens
aaaaagaaact

SEQ ID NO: 610 - DNA, 11 bp, Homo sapiens
tactgaaaaaa

SEQ ID NO: 611 - DNA, 11 bp, Homo sapiens
cacctggaggc

SEQ ID NO: 612 - DNA, 11 bp, Homo sapiens
gcaagagccca

SEQ ID NO: 613 - DNA, 11 bp, Homo sapiens
aacccggggag

SEQ ID NO: 614 - DNA, 11 bp, Homo sapiens
ttgcccagggt

SEQ ID NO: 615 - DNA, 11 bp, Homo sapiens
aagcagttaca

SEQ ID NO: 616 - DNA, 11 bp, Homo sapiens
gcagtcataca

SEQ ID NO: 617 - DNA, 11 bp, Homo sapiens
ggggcacacac

SEQ ID NO: 618 - DNA, 11 bp, Homo sapiens
agggaaggtga

SEQ ID NO: 619 - DNA, 11 bp, Homo sapiens
agccgctgtgc

SEQ ID NO: 620 - DNA, 11 bp, Homo sapiens
tcaagccatca

SEQ ID NO: 621 - DNA, 11 bp, Homo sapiens
gtggcgggcat

SEQ ID NO: 622 - DNA, 11 bp, Homo sapiens
acctgggtgct

SEQ ID NO: 623 - DNA, 11 bp, Homo sapiens
tgtggcgtata

SEQ ID NO: 624 - DNA, 11 bp, Homo sapiens
cgggcaccttc

SEQ ID NO: 625 - DNA, 11 bp, Homo sapiens
cccttgaggag

SEQ ID NO: 626 - DNA, 11 bp, Homo sapiens
aatgtttttaa

SEQ ID NO: 627 - DNA, 11 bp, Homo sapiens
cctctcccatt

SEQ ID NO: 628 - DNA, 11 bp, Homo sapiens
tgttctgattt

SEQ ID NO: 629 - DNA, 11 bp, Homo sapiens
cctgtagtgcc

SEQ ID NO: 630 - DNA, 11 bp, Homo sapiens
ccactgtattc

SEQ ID NO: 631 - DNA, 11 bp, Homo sapiens
agaaatgtatg

SEQ ID NO: 632 - DNA, 11 bp, Homo sapiens
aggtcagaaga

SEQ ID NO: 633 - DNA, 11 bp, Homo sapiens
attaagaaaat

SEQ ID NO: 634 - DNA, 11 bp, Homo sapiens
aacccgggggg

SEQ ID NO: 635 - DNA, 11 bp, Homo sapiens
caccacaacaa

SEQ ID NO: 636 - DNA, 11 bp, Homo sapiens
ttccccagggt

SEQ ID NO: 637 - DNA, 11 bp, Homo sapiens
cacactatagg

SEQ ID NO: 638 - DNA, 11 bp, Homo sapiens
gggaaagaggg

SEQ ID NO: 639 - DNA, 11 bp, Homo sapiens
gctgggcgcgg

SEQ ID NO: 640 - DNA, 11 bp, Homo sapiens
ggggcaacagc

SEQ ID NO: 641 - DNA, 11 bp, Homo sapiens
gtggcaggccc

SEQ ID NO: 642 - DNA, 11 bp, Homo sapiens
catatcccctc

SEQ ID NO: 643 - DNA, 11 bp, Homo sapiens
cttaggagtca

SEQ ID NO: 644 - DNA, 11 bp, Homo sapiens
cagcacagtgg

SEQ ID NO: 645 - DNA, 11 bp, Homo sapiens
atgctcaaagg

SEQ ID NO: 646 - DNA, 11 bp, Homo sapiens
ttctgtgcata

SEQ ID NO: 647 - DNA, 11 bp, Homo sapiens
gcataatgttt

SEQ ID NO: 648 - DNA, 11 bp, Homo sapiens
tggccagctcc

SEQ ID NO: 649 - DNA, 11 bp, Homo sapiens
tctggcccagc

SEQ ID NO: 650 - DNA, 11 bp, Homo sapiens
atcctgagtta

SEQ ID NO: 651 - DNA, 11 bp, Homo sapiens
acaaatgaaaa

SEQ ID NO: 652 - DNA, 11 bp, Homo sapiens
tacatttcaag

SEQ ID NO: 653 - DNA, 11 bp, Homo sapiens
gcaaaatgctg

SEQ ID NO: 654 - DNA, 11 bp, Homo sapiens
tttaagaaatg

SEQ ID NO: 655 - DNA, 11 bp, Homo sapiens
acccacctgtg

SEQ ID NO: 656 - DNA, 11 bp, Homo sapiens
gcagcagtgtc

SEQ ID NO: 657 - DNA, 11 bp, Homo sapiens
ccattaaaaaa

SEQ ID NO: 658 - DNA, 11 bp, Homo sapiens
aaagagggacg

SEQ ID NO: 659 - DNA, 11 bp, Homo sapiens
acacttaaaaa

SEQ ID NO: 660 - DNA, 11 bp, Homo sapiens
tcacaaaaaaa

SEQ ID NO: 661 - DNA, 11 bp, Homo sapiens
atttaatatat

SEQ ID NO: 662 - DNA, 11 bp, Homo sapiens
agttcaaggct

SEQ ID NO: 663 - DNA, 11 bp, Homo sapiens
gagttgctatt

SEQ ID NO: 664 - DNA, 11 bp, Homo sapiens
gactgtcaaaa

SEQ ID NO: 665 - DNA, 11 bp, Homo sapiens
gcgcaacaact

SEQ ID NO: 666 - DNA, 11 bp, Homo sapiens
taaatcagaga

SEQ ID NO: 667 - DNA, 11 bp, Homo sapiens
taaatgaatga

SEQ ID NO: 668 - DNA, 11 bp, Homo sapiens
aataggaagat

SEQ ID NO: 669 - DNA, 11 bp, Homo sapiens
caattaaaaat

SEQ ID NO: 670 - DNA, 11 bp, Homo sapiens
gtgtatgtggt

SEQ ID NO: 671 - DNA, 11 bp, Homo sapiens
acaaacccaca

SEQ ID NO: 672 - DNA, 11 bp, Homo sapiens
caagtgaaagg

SEQ ID NO: 673 - DNA, 11 bp, Homo sapiens
gaacagaacgc

SEQ ID NO: 674 - DNA, 11 bp, Homo sapiens
ctaatggccct

SEQ ID NO: 675 - DNA, 11 bp, Homo sapiens
taatgtttttt

SEQ ID NO: 676 - DNA, 11 bp, Homo sapiens
atttggcctgt

SEQ ID NO: 677 - DNA, 11 bp, Homo sapiens
tctgggagggg

SEQ ID NO: 678 - DNA, 11 bp, Homo sapiens
gactaaattgt

SEQ ID NO: 679 - DNA, 11 bp, Homo sapiens
tattttcacaa

SEQ ID NO: 680 - DNA, 11 bp, Homo sapiens
gaggttttctg

SEQ ID NO: 681 - DNA, 11 bp, Homo sapiens
cctagaatccc

SEQ ID NO: 682 - DNA, 11 bp, Homo sapiens
cagcccctgtc

SEQ ID NO: 683 - DNA, 11 bp, Homo sapiens
gtgtcgggctc

SEQ ID NO: 684 - DNA, 11 bp, Homo sapiens
cacctgtaaac

SEQ ID NO: 685 - DNA, 11 bp, Homo sapiens
gcggcgactgc

SEQ ID NO: 686 - DNA, 11 bp, Homo sapiens
ggaatgaatga

SEQ ID NO: 687 - DNA, 11 bp, Homo sapiens
tgggatatagt

SEQ ID NO: 688 - DNA, 11 bp, Homo sapiens
gtggttgatgc

SEQ ID NO: 689 - DNA, 11 bp, Homo sapiens
gtggtaggtac

SEQ ID NO: 690 - DNA, 11 bp, Homo sapiens
gcctgccttta

SEQ ID NO: 691 - DNA, 11 bp, Homo sapiens
gatctcgcttt

SEQ ID NO: 692 - DNA, 11 bp, Homo sapiens
ctcctattttt

SEQ ID NO: 693 - DNA, 11 bp, Homo sapiens
gtgcgcacctg

SEQ ID NO: 694 - DNA, 11 bp, Homo sapiens
ataaaatgtct

SEQ ID NO: 695 - DNA, 11 bp, Homo sapiens
tttcaccccgt

SEQ ID NO: 696 - DNA, 11 bp, Homo sapiens
tatgtttaaaa

SEQ ID NO: 697 - DNA, 11 bp, Homo sapiens
gatcacttgag

SEQ ID NO: 698 - DNA, 11 bp, Homo sapiens
ttgagaaaaaa

SEQ ID NO: 699 - DNA, 11 bp, Homo sapiens
accctgggagg

SEQ ID NO: 700 - DNA, 11 bp, Homo sapiens
tgtggtggtgc

SEQ ID NO: 701 - DNA, 11 bp, Homo sapiens
gattggccaga

SEQ ID NO: 702 - DNA, 11 bp, Homo sapiens
gctgagttatt

SEQ ID NO: 703 - DNA, 11 bp, Homo sapiens
agtattcctaa

SEQ ID NO: 704 - DNA, 11 bp, Homo sapiens
tgtctgccatt

SEQ ID NO: 705 - DNA, 11 bp, Homo sapiens
cccctgtactc

SEQ ID NO: 706 - DNA, 11 bp, Homo sapiens
ctttttaaaga

SEQ ID NO: 707 - DNA, 11 bp, Homo sapiens
tacccgaaaac

SEQ ID NO: 708 - DNA, 11 bp, Homo sapiens
tgcctctagtc

SEQ ID NO: 709 - DNA, 11 bp, Homo sapiens
ccgccgcactc

SEQ ID NO: 710 - DNA, 11 bp, Homo sapiens
ctaagaggggt

SEQ ID NO: 711 - DNA, 11 bp, Homo sapiens
ctgctgtagtc

SEQ ID NO: 712 - DNA, 11 bp, Homo sapiens
ggaccctcatt

SEQ ID NO: 713 - DNA, 11 bp, Homo sapiens
aactaattctc

SEQ ID NO: 714 - DNA, 11 bp, Homo sapiens
gcagtgccaag

SEQ ID NO: 715 - DNA, 11 bp, Homo sapiens
attggagcgca

SEQ ID NO: 716 - DNA, 11 bp, Homo sapiens
tgaaaactccc

SEQ ID NO: 717 - DNA, 11 bp, Homo sapiens
ctcccagccac

SEQ ID NO: 718 - DNA, 11 bp, Homo sapiens
gttttaaaaaa

SEQ ID NO: 719 - DNA, 11 bp, Homo sapiens
gaatcaagctg

SEQ ID NO: 720 - DNA, 11 bp, Homo sapiens
ctgggcatttt

SEQ ID NO: 721 - DNA, 11 bp, Homo sapiens
ttgtttgtgta

SEQ ID NO: 722 - DNA, 11 bp, Homo sapiens
aggactggcat

SEQ ID NO: 723 - DNA, 11 bp, Homo sapiens
tcgcttttaag

SEQ ID NO: 724 - DNA, 11 bp, Homo sapiens
aagtgaaaaaa

SEQ ID NO: 725 - DNA, 11 bp, Homo sapiens
caaattagaat

SEQ ID NO: 726 - DNA, 11 bp, Homo sapiens
ataccactaag

SEQ ID NO: 727 - DNA, 11 bp, Homo sapiens
ggtgatggagg

SEQ ID NO: 728 - DNA, 11 bp, Homo sapiens
ttgggtttctg

SEQ ID NO: 729 - DNA, 11 bp, Homo sapiens
aataaatgccc

SEQ ID NO: 730 - DNA, 11 bp, Homo sapiens
catacacacat

SEQ ID NO: 731 - DNA, 11 bp, Homo sapiens
gttatacaaca

SEQ ID NO: 732 - DNA, 11 bp, Homo sapiens
ctcacaggcac

SEQ ID NO: 733 - DNA, 11 bp, Homo sapiens
tacccattacc

SEQ ID NO: 734 - DNA, 11 bp, Homo sapiens
tttctttccct

SEQ ID NO: 735 - DNA, 11 bp, Homo sapiens
catctgtactg

SEQ ID NO: 736 - DNA, 11 bp, Homo sapiens
gagctgttttg

SEQ ID NO: 737 - DNA, 11 bp, Homo sapiens
acacgtactat

SEQ ID NO: 738 - DNA, 11 bp, Homo sapiens
tttatatttca

SEQ ID NO: 739 - DNA, 11 bp, Homo sapiens
cacagttttaa

SEQ ID NO: 740 - DNA, 11 bp, Homo sapiens
tggttttacca

SEQ ID NO: 741 - DNA, 11 bp, Homo sapiens
gtgcctggtat

SEQ ID NO: 742 - DNA, 11 bp, Homo sapiens
taccttagaac

SEQ ID NO: 743 - DNA, 11 bp, Homo sapiens
gtgtaggaggt

SEQ ID NO: 744 - DNA, 11 bp, Homo sapiens
ccctggagaca

SEQ ID NO: 745 - DNA, 11 bp, Homo sapiens
cctgtagccca

SEQ ID NO: 746 - DNA, 11 bp, Homo sapiens
tatccatatta

SEQ ID NO: 747 - DNA, 11 bp, Homo sapiens
ctactaattgc

SEQ ID NO: 748 - DNA, 11 bp, Homo sapiens
ggcctccaaga

SEQ ID NO: 749 - DNA, 11 bp, Homo sapiens
gtggctgacac

SEQ ID NO: 750 - DNA, 11 bp, Homo sapiens
ctgtacttgtg

SEQ ID NO: 751 - DNA, 11 bp, Homo sapiens
acaaaacccca

SEQ ID NO: 752 - DNA, 11 bp, Homo sapiens
agccaccaccc

SEQ ID NO: 753 - DNA, 11 bp, Homo sapiens
tgcctgtagtt

SEQ ID NO: 754 - DNA, 11 bp, Homo sapiens
gctaacccctg

SEQ ID NO: 755 - DNA, 11 bp, Homo sapiens
gcaaaaccctg

SEQ ID NO: 756 - DNA, 11 bp, Homo sapiens
aaacattaaaa

SEQ ID NO: 757 - DNA, 11 bp, Homo sapiens
gtggcacttgc

SEQ ID NO: 758 - DNA, 11 bp, Homo sapiens
gaagctacacc

SEQ ID NO: 759 - DNA, 11 bp, Homo sapiens
taaggtagagg

SEQ ID NO: 760 - DNA, 11 bp, Homo sapiens
tgggtcatttg

SEQ ID NO: 761 - DNA, 11 bp, Homo sapiens
gctcactgaag

SEQ ID NO: 762 - DNA, 11 bp, Homo sapiens
cacctatcaat

SEQ ID NO: 763 - DNA, 11 bp, Homo sapiens
cttcaatctta

SEQ ID NO: 764 - DNA, 11 bp, Homo sapiens
cagtcctcttg

SEQ ID NO: 765 - DNA, 11 bp, Homo sapiens
ttaccaaagca

SEQ ID NO: 766 - DNA, 11 bp, Homo sapiens
atgaaacccta

SEQ ID NO: 767 - DNA, 11 bp, Homo sapiens
tcactccagcc

SEQ ID NO: 768 - DNA, 11 bp, Homo sapiens
aaaggcatcag

SEQ ID NO: 769 - DNA, 11 bp, Homo sapiens
gacatctgtcc

SEQ ID NO: 770 - DNA, 11 bp, Homo sapiens
tgtcttttctg

SEQ ID NO: 771 - DNA, 11 bp, Homo sapiens
tgactgtatta

SEQ ID NO: 772 - DNA, 11 bp, Homo sapiens
gcaagacctca

SEQ ID NO: 773 - DNA, 11 bp, Homo sapiens
aggaaggaaaa

SEQ ID NO: 774 - DNA, 11 bp, Homo sapiens
ctgccggagca

SEQ ID NO: 775 - DNA, 11 bp, Homo sapiens
tattccagaac

SEQ ID NO: 776 - DNA, 11 bp, Homo sapiens
agcgaaactcc

SEQ ID NO: 777 - DNA, 11 bp, Homo sapiens
ctgggggtcag

SEQ ID NO: 778 - DNA, 11 bp, Homo sapiens
gctgtaatccc

SEQ ID NO: 779 - DNA, 11 bp, Homo sapiens
cacctgtggtc

SEQ ID NO: 780 - DNA, 11 bp, Homo sapiens
ctctagagaaa

SEQ ID NO: 781 - DNA, 11 bp, Homo sapiens
gcaaatcctgt

SEQ ID NO: 782 - DNA, 11 bp, Homo sapiens
tatatgctggg

SEQ ID NO: 783 - DNA, 11 bp, Homo sapiens
gggagacccca

SEQ ID NO: 784 - DNA, 11 bp, Homo sapiens
tggaaatgaaa

SEQ ID NO: 785 - DNA, 11 bp, Homo sapiens
cctgtaatctg

SEQ ID NO: 786 - DNA, 11 bp, Homo sapiens
tgtattgtaca

SEQ ID NO: 787 - DNA, 11 bp, Homo sapiens
acatagaccga

SEQ ID NO: 788 - DNA, 11 bp, Homo sapiens
gttccacagaa

SEQ ID NO: 789 - DNA, 11 bp, Homo sapiens
gtggcagagac

SEQ ID NO: 790 - DNA, 11 bp, Homo sapiens
agccgagatcg

SEQ ID NO: 791 - DNA, 11 bp, Homo sapiens
cctgtagttcc

SEQ ID NO: 792 - DNA, 11 bp, Homo sapiens
gtaaaaccctg

SEQ ID NO: 793 - DNA, 11 bp, Homo sapiens
agtctgctggg

SEQ ID NO: 794 - DNA, 11 bp, Homo sapiens
ctgggcagaga

SEQ ID NO: 795 - DNA, 11 bp, Homo sapiens
tcacacaaagg

SEQ ID NO: 796 - DNA, 11 bp, Homo sapiens
cgcctgtaatt

SEQ ID NO: 797 - DNA, 11 bp, Homo sapiens
attgctctctg

SEQ ID NO: 798 - DNA, 11 bp, Homo sapiens
cctgtggttcc

SEQ ID NO: 799 - DNA, 11 bp, Homo sapiens
tgtccacacat

SEQ ID NO: 800 - DNA, 11 bp, Homo sapiens
gacggagcctt

SEQ ID NO: 801 - DNA, 11 bp, Homo sapiens
actgggcagtg

SEQ ID NO: 802 - DNA, 11 bp, Homo sapiens
cggcaccttaa

SEQ ID NO: 803 - DNA, 11 bp, Homo sapiens
ctgaaacagct

SEQ ID NO: 804 - DNA, 11 bp, Homo sapiens
tgttacctggt

SEQ ID NO: 805 - DNA, 11 bp, Homo sapiens
tctttgctctt

SEQ ID NO: 806 - DNA, 11 bp, Homo sapiens
aaatcaccaat

SEQ ID NO: 807 - DNA, 11 bp, Homo sapiens
tgtattgactg

SEQ ID NO: 808 - DNA, 11 bp, Homo sapiens
ttcacttcaac

SEQ ID NO: 809 - DNA, 11 bp, Homo sapiens
cgtggggctgc

SEQ ID NO: 810 - DNA, 11 bp, Homo sapiens
tcacagagtct

SEQ ID NO: 811 - DNA, 11 bp, Homo sapiens
tgccactgtgc

SEQ ID NO: 812 - DNA, 11 bp, Homo sapiens
ctataaaagtg

SEQ ID NO: 813 - DNA, 11 bp, Homo sapiens
ttggctaggct

SEQ ID NO: 814 - DNA, 11 bp, Homo sapiens
agggagcagag

SEQ ID NO: 815 - DNA, 11 bp, Homo sapiens
ttggtgtgctg

SEQ ID NO: 816 - DNA, 11 bp, Homo sapiens
tggaaagtgaa

SEQ ID NO: 817 - DNA, 11 bp, Homo sapiens
ttgattgagtg

SEQ ID NO: 818 - DNA, 11 bp, Homo sapiens
cagggatctgc

SEQ ID NO: 819 - DNA, 11 bp, Homo sapiens
attgcaccacc

SEQ ID NO: 820 - DNA, 11 bp, Homo sapiens
ctggtggccac

SEQ ID NO: 821 - DNA, 11 bp, Homo sapiens
aatcattgagg

SEQ ID NO: 822 - DNA, 11 bp, Homo sapiens
acccccttcct

SEQ ID NO: 823 - DNA, 11 bp, Homo sapiens
cctggccaaaa

SEQ ID NO: 824 - DNA, 11 bp, Homo sapiens
ttaacccctcc

SEQ ID NO: 825 - DNA, 11 bp, Homo sapiens
acaggctacgg

SEQ ID NO: 826 - DNA, 11 bp, Homo sapiens
agatgagatga

SEQ ID NO: 827 - DNA, 11 bp, Homo sapiens
aaaaaaaaggc

SEQ ID NO: 828 - DNA, 11 bp, Homo sapiens
tacgctaaaac

SEQ ID NO: 829 - DNA, 11 bp, Homo sapiens
gtagaagtgta

SEQ ID NO: 830 - DNA, 11 bp, Homo sapiens
tgcccagcaat

SEQ ID NO: 831 - DNA, 11 bp, Homo sapiens
agcaggtttgc

SEQ ID NO: 832 - DNA, 11 bp, Homo sapiens
agagagagccc

SEQ ID NO: 833 - DNA, 11 bp, Homo sapiens
gcactgattaa

SEQ ID NO: 834 - DNA, 11 bp, Homo sapiens
cagagacaagc

SEQ ID NO: 835 - DNA, 11 bp, Homo sapiens
cagttgtctag

SEQ ID NO: 836 - DNA, 11 bp, Homo sapiens
tgtgtgtgcta

SEQ ID NO: 837 - DNA, 11 bp, Homo sapiens
gcctggaccag

SEQ ID NO: 838 - DNA, 11 bp, Homo sapiens
tgtttaataaa

SEQ ID NO: 839 - DNA, 11 bp, Homo sapiens
cattttctaat

SEQ ID NO: 840 - DNA, 11 bp, Homo sapiens
agctttcccaa

SEQ ID NO: 841 - DNA, 11 bp, Homo sapiens
actcagtagcc

SEQ ID NO: 842 - DNA, 11 bp, Homo sapiens
tcaaattgaaa

SEQ ID NO: 843 - DNA, 11 bp, Homo sapiens
ggccagccctg

SEQ ID NO: 844 - DNA, 11 bp, Homo sapiens
acattttgttc

SEQ ID NO: 845 - DNA, 11 bp, Homo sapiens
ggcaagcaggc

SEQ ID NO: 846 - DNA, 11 bp, Homo sapiens
tgcttggtaca

SEQ ID NO: 847 - DNA, 11 bp, Homo sapiens
taagtctaatt

SEQ ID NO: 848 - DNA, 11 bp, Homo sapiens
tattttacttg

SEQ ID NO: 849 - DNA, 11 bp, Homo sapiens
ctctctcccag

SEQ ID NO: 850 - DNA, 11 bp, Homo sapiens
agcaaattttc

SEQ ID NO: 851 - DNA, 11 bp, Homo sapiens
ccaagacctct

SEQ ID NO: 852 - DNA, 11 bp, Homo sapiens
gacaggttctg

SEQ ID NO: 853 - DNA, 11 bp, Homo sapiens
cttctggagaa

SEQ ID NO: 854 - DNA, 11 bp, Homo sapiens
tgggttttgtt

SEQ ID NO: 855 - DNA, 11 bp, Homo sapiens
caccgctgcag

SEQ ID NO: 856 - DNA, 11 bp, Homo sapiens
gaaacaggaaa

SEQ ID NO: 857 - DNA, 11 bp, Homo sapiens
ccttcttgcta

SEQ ID NO: 858 - DNA, 11 bp, Homo sapiens
ataatctgaag

SEQ ID NO: 859 - DNA, 11 bp, Homo sapiens
ctaaatatagg

SEQ ID NO: 860 - DNA, 11 bp, Homo sapiens
aatgctatggt

SEQ ID NO: 861 - DNA, 11 bp, Homo sapiens
gtgaatgaaac

SEQ ID NO: 862 - DNA, 11 bp, Homo sapiens
tccacaaaaaa

SEQ ID NO: 863 - DNA, 11 bp, Homo sapiens
agaattgctta

SEQ ID NO: 864 - DNA, 11 bp, Homo sapiens
cctctaattcc

SEQ ID NO: 865 - DNA, 11 bp, Homo sapiens
ttggacaagaa

SEQ ID NO: 866 - DNA, 11 bp, Homo sapiens
ggctgggcgcg

SEQ ID NO: 867 - DNA, 11 bp, Homo sapiens
caacacaaagc

SEQ ID NO: 868 - DNA, 11 bp, Homo sapiens
ggcccggcctc

SEQ ID NO: 869 - DNA, 11 bp, Homo sapiens
gctaaaaaatt

SEQ ID NO: 870 - DNA, 11 bp, Homo sapiens
ttttccttgtt

SEQ ID NO: 871 - DNA, 11 bp, Homo sapiens
gccgcctctgt

SEQ ID NO: 872 - DNA, 11 bp, Homo sapiens
ggctggttcca

SEQ ID NO: 873 - DNA, 11 bp, Homo sapiens
aaggaaatgaa

SEQ ID NO: 874 - DNA, 11 bp, Homo sapiens
aatagatgata

SEQ ID NO: 875 - DNA, 11 bp, Homo sapiens
tataagtggac

SEQ ID NO: 876 - DNA, 11 bp, Homo sapiens
gaaaacataat

SEQ ID NO: 877 - DNA, 11 bp, Homo sapiens
ctttgtaaaaa

SEQ ID NO: 878 - DNA, 11 bp, Homo sapiens
agctgtttaaa

SEQ ID NO: 879 - DNA, 11 bp, Homo sapiens
ggggacagagc

SEQ ID NO: 880 - DNA, 11 bp, Homo sapiens
ataaagccaaa

SEQ ID NO: 881 - DNA, 11 bp, Homo sapiens
cccctgcattc

SEQ ID NO: 882 - DNA, 11 bp, Homo sapiens
gctgagaagca

SEQ ID NO: 883 - DNA, 11 bp, Homo sapiens
gaatacgttgg

SEQ ID NO: 884 - DNA, 11 bp, Homo sapiens
atttctaacaa

SEQ ID NO: 885 - DNA, 11 bp, Homo sapiens
agatcttcttg

SEQ ID NO: 886 - DNA, 11 bp, Homo sapiens
aaaaactctac

SEQ ID NO: 887 - DNA, 11 bp, Homo sapiens
aggataaactc

SEQ ID NO: 888 - DNA, 11 bp, Homo sapiens
cttgtgaggcc

SEQ ID NO: 889 - DNA, 11 bp, Homo sapiens
gtaacagtaat

SEQ ID NO: 890 - DNA, 11 bp, Homo sapiens
taaacgaaaat

SEQ ID NO: 891 - DNA, 11 bp, Homo sapiens
aggggaatggg

SEQ ID NO: 892 - DNA, 11 bp, Homo sapiens
ggccgtgctgc

SEQ ID NO: 893 - DNA, 11 bp, Homo sapiens
ggaacctatcc

SEQ ID NO: 894 - DNA, 11 bp, Homo sapiens
ccagtgccctc

SEQ ID NO: 895 - DNA, 11 bp, Homo sapiens
attttgcttaa

SEQ ID NO: 896 - DNA, 11 bp, Homo sapiens
agccaagagcc

SEQ ID NO: 897 - DNA, 11 bp, Homo sapiens
gtagactgaaa

SEQ ID NO: 898 - DNA, 11 bp, Homo sapiens
tggtatgcacc

SEQ ID NO: 899 - DNA, 11 bp, Homo sapiens
tctgttttgtg

SEQ ID NO: 900 - DNA, 11 bp, Homo sapiens
ccaatcaatgg

SEQ ID NO: 901 - DNA, 11 bp, Homo sapiens
ttccccaggct

SEQ ID NO: 902 - DNA, 11 bp, Homo sapiens
caacagcccca

SEQ ID NO: 903 - DNA, 11 bp, Homo sapiens
ctcctggaata

SEQ ID NO: 904 - DNA, 11 bp, Homo sapiens
tggtgaagaac

SEQ ID NO: 905 - DNA, 11 bp, Homo sapiens
cacaccgcccg

SEQ ID NO: 906 - DNA, 11 bp, Homo sapiens
cccccccccca

SEQ ID NO: 907 - DNA, 11 bp, Homo sapiens
ttttgttgctc

SEQ ID NO: 908 - DNA, 11 bp, Homo sapiens
gtaaaaccccg

SEQ ID NO: 909 - DNA, 11 bp, Homo sapiens
taataaagaat

SEQ ID NO: 910 - DNA, 11 bp, Homo sapiens
aaaataaacct

SEQ ID NO: 911 - DNA, 11 bp, Homo sapiens
gtggtaggtgc

SEQ ID NO: 912 - DNA, 11 bp, Homo sapiens
gtgaaattcca

SEQ ID NO: 913 - DNA, 11 bp, Homo sapiens
cctctagtccc

SEQ ID NO: 914 - DNA, 11 bp, Homo sapiens
tggaaatgacc

SEQ ID NO: 915 - DNA, 11 bp, Homo sapiens
aaccctggagg

SEQ ID NO: 916 - DNA, 11 bp, Homo sapiens
aggatcacttg

SEQ ID NO: 917 - DNA, 11 bp, Homo sapiens
ccactgcattg

SEQ ID NO: 918 - DNA, 11 bp, Homo sapiens
aactggctgct

SEQ ID NO: 919 - DNA, 11 bp, Homo sapiens
cctgtaacccc

SEQ ID NO: 920 - DNA, 11 bp, Homo sapiens
gcactccagcc

SEQ ID NO: 921 - DNA, 11 bp, Homo sapiens
gtggtgagcac

SEQ ID NO: 922 - DNA, 11 bp, Homo sapiens
atggcaggtgc

SEQ ID NO: 923 - DNA, 11 bp, Homo sapiens
ccattacactc

SEQ ID NO: 924 - DNA, 11 bp, Homo sapiens
ggtgacagagt

SEQ ID NO: 925 - DNA, 11 bp, Homo sapiens
gtggtttgctg

SEQ ID NO: 926 - DNA, 11 bp, Homo sapiens
tctgcctatgc

SEQ ID NO: 927 - DNA, 11 bp, Homo sapiens
gcgaaaacccc

SEQ ID NO: 928 - DNA, 11 bp, Homo sapiens
taccccttgaa

SEQ ID NO: 929 - DNA, 11 bp, Homo sapiens
taaatggaagt

SEQ ID NO: 930 - DNA, 11 bp, Homo sapiens
tgtgtctggga

SEQ ID NO: 931 - DNA, 11 bp, Homo sapiens
gcttcagtggg

SEQ ID NO: 932 - DNA, 11 bp, Homo sapiens
ctttactgtgt

SEQ ID NO: 933 - DNA, 11 bp, Homo sapiens
cactttgtgtg

SEQ ID NO: 934 - DNA, 11 bp, Homo sapiens
ggtgacagaac

SEQ ID NO: 935 - DNA, 11 bp, Homo sapiens
actaagattga

SEQ ID NO: 936 - DNA, 11 bp, Homo sapiens
ccaatgttgtt

SEQ ID NO: 937 - DNA, 11 bp, Homo sapiens
gtggtgtgagc

SEQ ID NO: 938 - DNA, 11 bp, Homo sapiens
tgaagaatgtg

SEQ ID NO: 939 - DNA, 11 bp, Homo sapiens
gccagtgcctg

SEQ ID NO: 940 - DNA, 11 bp, Homo sapiens
ccactgctctc

SEQ ID NO: 941 - DNA, 11 bp, Homo sapiens
ctattgcactc

SEQ ID NO: 942 - DNA, 11 bp, Homo sapiens
atgtacctgat

SEQ ID NO: 943 - DNA, 11 bp, Homo sapiens
gtgggggggag

SEQ ID NO: 944 - DNA, 11 bp, Homo sapiens
cacctgtagtc

SEQ ID NO: 945 - DNA, 11 bp, Homo sapiens
tctgcacacac

SEQ ID NO: 946 - DNA, 11 bp, Homo sapiens
gacaattctgt

SEQ ID NO: 947 - DNA, 11 bp, Homo sapiens
aggggaaggtg

SEQ ID NO: 948 - DNA, 11 bp, Homo sapiens
caagacggggg

SEQ ID NO: 949 - DNA, 11 bp, Homo sapiens
taatttgcgtt

SEQ ID NO: 950 - DNA, 11 bp, Homo sapiens
agaatcgtttg

SEQ ID NO: 951 - DNA, 11 bp, Homo sapiens
aacagtcaaaa

SEQ ID NO: 952 - DNA, 11 bp, Homo sapiens
gcaaaactctg

SEQ ID NO: 953 - DNA, 11 bp, Homo sapiens
gccagccagtg

SEQ ID NO: 954 - DNA, 11 bp, Homo sapiens
gcgaaatccca

SEQ ID NO: 955 - DNA, 11 bp, Homo sapiens
tctgtggtccc

SEQ ID NO: 956 - DNA, 11 bp, Homo sapiens
cctataattcc

SEQ ID NO: 957 - DNA, 11 bp, Homo sapiens
gcaataaaata

SEQ ID NO: 958 - DNA, 11 bp, Homo sapiens
tggaatccagg

SEQ ID NO: 959 - DNA, 11 bp, Homo sapiens
cttttgtcagc

SEQ ID NO: 960 - DNA, 11 bp, Homo sapiens
ttattgtattg

SEQ ID NO: 961 - DNA, 11 bp, Homo sapiens
atggaggtatg

SEQ ID NO: 962 - DNA, 11 bp, Homo sapiens
tcgtgttttcg

SEQ ID NO: 963 - DNA, 11 bp, Homo sapiens
ttgtggcccca

SEQ ID NO: 964 - DNA, 11 bp, Homo sapiens
tttgtttgttt

SEQ ID NO: 965 - DNA, 11 bp, Homo sapiens
gtcacgaacat

SEQ ID NO: 966 - DNA, 11 bp, Homo sapiens
gttaaggtaaa

SEQ ID NO: 967 - DNA, 11 bp, Homo sapiens
aagaagaaaag

SEQ ID NO: 968 - DNA, 11 bp, Homo sapiens
tagccagttaa

SEQ ID NO: 969 - DNA, 11 bp, Homo sapiens
ctgcccggggc

SEQ ID NO: 970 - DNA, 11 bp, Homo sapiens
aacggtgtttg

SEQ ID NO: 971 - DNA, 11 bp, Homo sapiens
cataaacgggc

SEQ ID NO: 972 - DNA, 11 bp, Homo sapiens
tccttagatta

SEQ ID NO: 973 - DNA, 11 bp, Homo sapiens
ctggcatagaa

SEQ ID NO: 974 - DNA, 11 bp, Homo sapiens
actgcccctga

SEQ ID NO: 975 - DNA, 11 bp, Homo sapiens
tctgctgcctg

SEQ ID NO: 976 - DNA, 11 bp, Homo sapiens
gaagatgaata

SEQ ID NO: 977 - DNA, 11 bp, Homo sapiens
gaccaaagaag

SEQ ID NO: 978 - DNA, 11 bp, Homo sapiens
gaatgaatgca

SEQ ID NO: 979 - DNA, 11 bp, Homo sapiens
gcacaactaaa

SEQ ID NO: 980 - DNA, 11 bp, Homo sapiens
gaattttacac

SEQ ID NO: 981 - DNA, 11 bp, Homo sapiens
aaggggcggcg

SEQ ID NO: 982 - DNA, 11 bp, Homo sapiens
agggactttat

SEQ ID NO: 983 - DNA, 11 bp, Homo sapiens
tattcagaacc

SEQ ID NO: 984 - DNA, 11 bp, Homo sapiens
acaactggaat

SEQ ID NO: 985 - DNA, 11 bp, Homo sapiens
taataaaatgc

SEQ ID NO: 986 - DNA, 11 bp, Homo sapiens
ttatgcttgta

SEQ ID NO: 987 - DNA, 11 bp, Homo sapiens
ttttgaagata

SEQ ID NO: 988 - DNA, 11 bp, Homo sapiens
gcaaatcagat

SEQ ID NO: 989 - DNA, 11 bp, Homo sapiens
gtaaaacccct

SEQ ID NO: 990 - DNA, 11 bp, Homo sapiens
ggccaggcgtg

SEQ ID NO: 991 - DNA, 11 bp, Homo sapiens
aatgttagagc

SEQ ID NO: 992 - DNA, 11 bp, Homo sapiens
tacctatagtc

SEQ ID NO: 993 - DNA, 11 bp, Homo sapiens
tgtgagaaagt

SEQ ID NO: 994 - DNA, 11 bp, Homo sapiens
aattgtgcatt

SEQ ID NO: 995 - DNA, 11 bp, Homo sapiens
gtggtgcgcat

SEQ ID NO: 996 - DNA, 11 bp, Homo sapiens
gtttataatta

SEQ ID NO: 997 - DNA, 11 bp, Homo sapiens
ctggcaccctg

SEQ ID NO: 998 - DNA, 11 bp, Homo sapiens
aaaaatggtgg

SEQ ID NO: 999 - DNA, 11 bp, Homo sapiens
gagcaggcaaa

SEQ ID NO: 1000 - DNA, 11 bp, Homo sapiens
ccaaaaaagtg

SEQ ID NO: 1001 - DNA, 11 bp, Homo sapiens
ccagaggaatg

SEQ ID NO: 1002 - DNA, 11 bp, Homo sapiens
ccacaaaaaaa

SEQ ID NO: 1003 - DNA, 11 bp, Homo sapiens
gcttacctgct

SEQ ID NO: 1004 - DNA, 11 bp, Homo sapiens
tattagacacc

SEQ ID NO: 1005 - DNA, 11 bp, Homo sapiens
gaatgttgaca

SEQ ID NO: 1006 - DNA, 11 bp, Homo sapiens
tgaggggtggg

SEQ ID NO: 1007 - DNA, 11 bp, Homo sapiens
tatataagtac

SEQ ID NO: 1008 - DNA, 11 bp, Homo sapiens
taataatacaa

SEQ ID NO: 1009 - DNA, 11 bp, Homo sapiens
tgggaggctga

SEQ ID NO: 1010 - DNA, 11 bp, Homo sapiens
agctccttaag

SEQ ID NO: 1011 - DNA, 11 bp, Homo sapiens
ctttttgtggt

SEQ ID NO: 1012 - DNA, 11 bp, Homo sapiens
ctgtttttgaa

SEQ ID NO: 1013 - DNA, 11 bp, Homo sapiens
gcagactatcc

SEQ ID NO: 1014 - DNA, 11 bp, Homo sapiens
gttccctggtg

SEQ ID NO: 1015 - DNA, 11 bp, Homo sapiens
cctacagtccc

SEQ ID NO: 1016 - DNA, 11 bp, Homo sapiens
caatcctcctg

SEQ ID NO: 1017 - DNA, 11 bp, Homo sapiens
aacaagtaata

SEQ ID NO: 1018 - DNA, 11 bp, Homo sapiens
tccagtacaga

SEQ ID NO: 1019 - DNA, 11 bp, Homo sapiens
ggaggctgggg

SEQ ID NO: 1020 - DNA, 11 bp, Homo sapiens
actctgctcgg

SEQ ID NO: 1021 - DNA, 11 bp, Homo sapiens
ttctgtgagtg

SEQ ID NO: 1022 - DNA, 11 bp, Homo sapiens
tcctgtgattt

SEQ ID NO: 1023 - DNA, 11 bp, Homo sapiens
aaagcacaagt

SEQ ID NO: 1024 - DNA, 11 bp, Homo sapiens
tttttgaaaaa

SEQ ID NO: 1025 - DNA, 11 bp, Homo sapiens
aagtcctggcc

SEQ ID NO: 1026 - DNA, 11 bp, Homo sapiens
tgttactggat

SEQ ID NO: 1027 - DNA, 11 bp, Homo sapiens
cctgtaatctt

SEQ ID NO: 1028 - DNA, 11 bp, Homo sapiens
gtggcgggcac

SEQ ID NO: 1029 - DNA, 11 bp, Homo sapiens
ccacttgcact

SEQ ID NO: 1030 - DNA, 11 bp, Homo sapiens
ttccatacccc

SEQ ID NO: 1031 - DNA, 11 bp, Homo sapiens
attgcatcact

SEQ ID NO: 1032 - DNA, 11 bp, Homo sapiens
gagttaaaaaa

SEQ ID NO: 1033 - DNA, 11 bp, Homo sapiens
gggccctggcc

SEQ ID NO: 1034 - DNA, 11 bp, Homo sapiens
cagatggaggc

SEQ ID NO: 1035 - DNA, 11 bp, Homo sapiens
cctctcccaca

SEQ ID NO: 1036 - DNA, 11 bp, Homo sapiens
gccagggggta

SEQ ID NO: 1037 - DNA, 11 bp, Homo sapiens
ctcagtctttt

SEQ ID NO: 1038 - DNA, 11 bp, Homo sapiens
gatgtattcta

SEQ ID NO: 1039 - DNA, 11 bp, Homo sapiens
cccttctgtaa

SEQ ID NO: 1040 - DNA, 11 bp, Homo sapiens
tggaactgtca

SEQ ID NO: 1041 - DNA, 11 bp, Homo sapiens
ggcctgtaatc

SEQ ID NO: 1042 - DNA, 11 bp, Homo sapiens
aggtatatatc

SEQ ID NO: 1043 - DNA, 11 bp, Homo sapiens
ttctgaaagga

SEQ ID NO: 1044 - DNA, 11 bp, Homo sapiens
agcctgtggtc

SEQ ID NO: 1045 - DNA, 11 bp, Homo sapiens
ttgcgtgtgtc

SEQ ID NO: 1046 - DNA, 11 bp, Homo sapiens
cataatttctc

SEQ ID NO: 1047 - DNA, 11 bp, Homo sapiens
tgggacgtgag

SEQ ID NO: 1048 - DNA, 11 bp, Homo sapiens
gcgaaatcccg

SEQ ID NO: 1049 - DNA, 11 bp, Homo sapiens
accaaaaacca

SEQ ID NO: 1050 - DNA, 11 bp, Homo sapiens
aacccaggagg

SEQ ID NO: 1051 - DNA, 11 bp, Homo sapiens
tctctgtgtag

SEQ ID NO: 1052 - DNA, 11 bp, Homo sapiens
cgcagtagggg

SEQ ID NO: 1053 - DNA, 11 bp, Homo sapiens
cgagagggaga

SEQ ID NO: 1054 - DNA, 11 bp, Homo sapiens
gtggcatctgc

SEQ ID NO: 1055 - DNA, 11 bp, Homo sapiens
ctaacggggcg

SEQ ID NO: 1056 - DNA, 11 bp, Homo sapiens
gcaaaacccct

SEQ ID NO: 1057 - DNA, 11 bp, Homo sapiens
actgctttact

SEQ ID NO: 1058 - DNA, 11 bp, Homo sapiens
ccccaggctgc

SEQ ID NO: 1059 - DNA, 11 bp, Homo sapiens
taaaatgttta

SEQ ID NO: 1060 - DNA, 11 bp, Homo sapiens
cctactgcact

SEQ ID NO: 1061 - DNA, 11 bp, Homo sapiens
gtggctcattc

SEQ ID NO: 1062 - DNA, 11 bp, Homo sapiens
aagcacaaaaa

SEQ ID NO: 1063 - DNA, 11 bp, Homo sapiens
gtggcgggcgc

SEQ ID NO: 1064 - DNA, 11 bp, Homo sapiens
agaaccttaaa

SEQ ID NO: 1065 - DNA, 11 bp, Homo sapiens
cctgaaatccc

SEQ ID NO: 1066 - DNA, 11 bp, Homo sapiens
gcgaaacccag

SEQ ID NO: 1067 - DNA, 11 bp, Homo sapiens
atgtaggtgcc

SEQ ID NO: 1068 - DNA, 11 bp, Homo sapiens
ttaaatagcac

SEQ ID NO: 1069 - DNA, 11 bp, Homo sapiens
ttttatttcca

SEQ ID NO: 1070 - DNA, 11 bp, Homo sapiens
aattacagcca

SEQ ID NO: 1071 - DNA, 11 bp, Homo sapiens
ccttacctaag

SEQ ID NO: 1072 - DNA, 11 bp, Homo sapiens
ctccctgaacg

SEQ ID NO: 1073 - DNA, 11 bp, Homo sapiens
aacacgaatga

SEQ ID NO: 1074 - DNA, 11 bp, Homo sapiens
gtggcaagcac

SEQ ID NO: 1075 - DNA, 11 bp, Homo sapiens
ttcaccatcct

SEQ ID NO: 1076 - DNA, 11 bp, Homo sapiens
agagggagtga

SEQ ID NO: 1077 - DNA, 11 bp, Homo sapiens
agtccttgaaa

SEQ ID NO: 1078 - DNA, 11 bp, Homo sapiens
cccagcctaaa

SEQ ID NO: 1079 - DNA, 11 bp, Homo sapiens
tttaactgaca

SEQ ID NO: 1080 - DNA, 11 bp, Homo sapiens
ccttgtaatcc

SEQ ID NO: 1081 - DNA, 11 bp, Homo sapiens
gaaggcttatc

SEQ ID NO: 1082 - DNA, 11 bp, Homo sapiens
tagcaaagatt

SEQ ID NO: 1083 - DNA, 11 bp, Homo sapiens
cacatctgtaa

SEQ ID NO: 1084 - DNA, 11 bp, Homo sapiens
ttcagtaataa

SEQ ID NO: 1085 - DNA, 11 bp, Homo sapiens
ggtgaaaccct

SEQ ID NO: 1086 - DNA, 11 bp, Homo sapiens
cttctgcctca

SEQ ID NO: 1087 - DNA, 11 bp, Homo sapiens
gagaggtgatt

SEQ ID NO: 1088 - DNA, 11 bp, Homo sapiens
atgtattttta

SEQ ID NO: 1089 - DNA, 11 bp, Homo sapiens
ctataggagac

SEQ ID NO: 1090 - DNA, 11 bp, Homo sapiens
tccgtgtataa

SEQ ID NO: 1091 - DNA, 11 bp, Homo sapiens
gcaaaacccca

SEQ ID NO: 1092 - DNA, 11 bp, Homo sapiens
ttccatagcct

SEQ ID NO: 1093 - DNA, 11 bp, Homo sapiens
ctgtgaaatgc

SEQ ID NO: 1094 - DNA, 11 bp, Homo sapiens
aaagaacatag

SEQ ID NO: 1095 - DNA, 11 bp, Homo sapiens
cacctgtaatc

SEQ ID NO: 1096 - DNA, 11 bp, Homo sapiens
ggcaacaagag

SEQ ID NO: 1097 - DNA, 11 bp, Homo sapiens
gtggcgggtgc

SEQ ID NO: 1098 - DNA, 11 bp, Homo sapiens
accttcaaaaa

SEQ ID NO: 1099 - DNA, 11 bp, Homo sapiens
acatctggctt

SEQ ID NO: 1100 - DNA, 11 bp, Homo sapiens
gtacgtattct

SEQ ID NO: 1101 - DNA, 11 bp, Homo sapiens
atccgcctgcc

SEQ ID NO: 1102 - DNA, 11 bp, Homo sapiens
acccacgtcag

SEQ ID NO: 1103 - DNA, 11 bp, Homo sapiens
taatcccagct

SEQ ID NO: 1104 - DNA, 11 bp, Homo sapiens
attgcaccact

SEQ ID NO: 1105 - DNA, 11 bp, Homo sapiens
aggaccaagga

SEQ ID NO: 1106 - DNA, 11 bp, Homo sapiens
taagctactaa

SEQ ID NO: 1107 - DNA, 11 bp, Homo sapiens
ctccattgtct

SEQ ID NO: 1108 - DNA, 11 bp, Homo sapiens
tgacattaaac

SEQ ID NO: 1109 - DNA, 11 bp, Homo sapiens
ggattcaagag

SEQ ID NO: 1110 - DNA, 11 bp, Homo sapiens
atgttatcata

SEQ ID NO: 1111 - DNA, 11 bp, Homo sapiens
tactctgttga

SEQ ID NO: 1112 - DNA, 11 bp, Homo sapiens
ggaaaagaaaa

SEQ ID NO: 1113 - DNA, 11 bp, Homo sapiens
tatacgttatg

SEQ ID NO: 1114 - DNA, 11 bp, Homo sapiens
cacttggtgat

SEQ ID NO: 1115 - DNA, 11 bp, Homo sapiens
atgaatgtaaa

SEQ ID NO: 1116 - DNA, 11 bp, Homo sapiens
tgttttcataa

SEQ ID NO: 1117 - DNA, 11 bp, Homo sapiens
agtttacgatt

SEQ ID NO: 1118 - DNA, 11 bp, Homo sapiens
gtggttcattc

SEQ ID NO: 1119 - DNA, 11 bp, Homo sapiens
caacaaaagca

SEQ ID NO: 1120 - DNA, 11 bp, Homo sapiens
cattttttgcg

SEQ ID NO: 1121 - DNA, 11 bp, Homo sapiens
ctgctaaacta

SEQ ID NO: 1122 - DNA, 11 bp, Homo sapiens
accctgaatgg

SEQ ID NO: 1123 - DNA, 11 bp, Homo sapiens
ttgtaacaaaa

SEQ ID NO: 1124 - DNA, 11 bp, Homo sapiens
tgctgttcata

SEQ ID NO: 1125 - DNA, 11 bp, Homo sapiens
tatgtgggtta

SEQ ID NO: 1126 - DNA, 11 bp, Homo sapiens
cagcaattata

SEQ ID NO: 1127 - DNA, 11 bp, Homo sapiens
ctccattgcca

SEQ ID NO: 1128 - DNA, 11 bp, Homo sapiens
gggtgggtcac

SEQ ID NO: 1129 - DNA, 11 bp, Homo sapiens
attccaccact

SEQ ID NO: 1130 - DNA, 11 bp, Homo sapiens
tcttactcaga

SEQ ID NO: 1131 - DNA, 11 bp, Homo sapiens
aataaaaaata

SEQ ID NO: 1132 - DNA, 11 bp, Homo sapiens
gagacagtgac

SEQ ID NO: 1133 - DNA, 11 bp, Homo sapiens
cctgggcaaca

SEQ ID NO: 1134 - DNA, 11 bp, Homo sapiens
cctttgcactc

SEQ ID NO: 1135 - DNA, 11 bp, Homo sapiens
tgcagacaggg

SEQ ID NO: 1136 - DNA, 11 bp, Homo sapiens
ttggcccagtc

SEQ ID NO: 1137 - DNA, 11 bp, Homo sapiens
tctttaaagta

SEQ ID NO: 1138 - DNA, 11 bp, Homo sapiens
atattggtggt

SEQ ID NO: 1139 - DNA, 11 bp, Homo sapiens
gtggcgaatgc

SEQ ID NO: 1140 - DNA, 11 bp, Homo sapiens
tattaacattc

SEQ ID NO: 1141 - DNA, 11 bp, Homo sapiens
tctccattcct

SEQ ID NO: 1142 - DNA, 11 bp, Homo sapiens
tatatagaatg

SEQ ID NO: 1143 - DNA, 11 bp, Homo sapiens
gcgagatcctg

SEQ ID NO: 1144 - DNA, 11 bp, Homo sapiens
cactccaacct

SEQ ID NO: 1145 - DNA, 11 bp, Homo sapiens
cgatgttaaaa

SEQ ID NO: 1146 - DNA, 11 bp, Homo sapiens
ccttctgaata

SEQ ID NO: 1147 - DNA, 11 bp, Homo sapiens
tgaggatccag

SEQ ID NO: 1148 - DNA, 11 bp, Homo sapiens
attgtacaaca

SEQ ID NO: 1149 - DNA, 11 bp, Homo sapiens
agcctattaaa

SEQ ID NO: 1150 - DNA, 11 bp, Homo sapiens
gcccctgcgcc

SEQ ID NO: 1151 - DNA, 11 bp, Homo sapiens
gtgaatgcact

SEQ ID NO: 1152 - DNA, 11 bp, Homo sapiens
ttcattaagaa

SEQ ID NO: 1153 - DNA, 11 bp, Homo sapiens
accgaggtgca

SEQ ID NO: 1154 - DNA, 11 bp, Homo sapiens
ttggtattgca

SEQ ID NO: 1155 - DNA, 11 bp, Homo sapiens
atgtattttca

SEQ ID NO: 1156 - DNA, 11 bp, Homo sapiens
gttgaattgca

SEQ ID NO: 1157 - DNA, 11 bp, Homo sapiens
tctgtcatccc

SEQ ID NO: 1158 - DNA, 11 bp, Homo sapiens
gtggtgcaaac

SEQ ID NO: 1159 - DNA, 11 bp, Homo sapiens
ggctttggaat

SEQ ID NO: 1160 - DNA, 11 bp, Homo sapiens
tttgcttttga

SEQ ID NO: 1161 - DNA, 11 bp, Homo sapiens
aaagcattaga

SEQ ID NO: 1162 - DNA, 11 bp, Homo sapiens
aaacaacccca

SEQ ID NO: 1163 - DNA, 11 bp, Homo sapiens
ctccttgtccc

SEQ ID NO: 1164 - DNA, 11 bp, Homo sapiens
gtgctgcacac

SEQ ID NO: 1165 - DNA, 11 bp, Homo sapiens
tttaaacttgg

SEQ ID NO: 1166 - DNA, 11 bp, Homo sapiens
cggcccaggtt

SEQ ID NO: 1167 - DNA, 11 bp, Homo sapiens
ctgactgatgg

SEQ ID NO: 1168 - DNA, 11 bp, Homo sapiens
atagatacaca

SEQ ID NO: 1169 - DNA, 11 bp, Homo sapiens
tggcagtagtg

SEQ ID NO: 1170 - DNA, 11 bp, Homo sapiens
aaatccttcta

SEQ ID NO: 1171 - DNA, 11 bp, Homo sapiens
tcaaactttgt

SEQ ID NO: 1172 - DNA, 11 bp, Homo sapiens
tacacctggaa

SEQ ID NO: 1173 - DNA, 11 bp, Homo sapiens
caaggattttt

SEQ ID NO: 1174 - DNA, 11 bp, Homo sapiens
ctagtataaaa

SEQ ID NO: 1175 - DNA, 11 bp, Homo sapiens
aatataaaaaa

SEQ ID NO: 1176 - DNA, 11 bp, Homo sapiens
caaatatggtt

SEQ ID NO: 1177 - DNA, 11 bp, Homo sapiens
caagaacaggg

SEQ ID NO: 1178 - DNA, 11 bp, Homo sapiens
tcaccggtcag

SEQ ID NO: 1179 - DNA, 11 bp, Homo sapiens
gtgaaaacccc

SEQ ID NO: 1180 - DNA, 11 bp, Homo sapiens
gtggtgggcac

SEQ ID NO: 1181 - DNA, 11 bp, Homo sapiens
gtggtgggtgc

SEQ ID NO: 1182 - DNA, 11 bp, Homo sapiens
ccgttgcactc

SEQ ID NO: 1183 - DNA, 11 bp, Homo sapiens
catcacggatc

SEQ ID NO: 1184 - DNA, 11 bp, Homo sapiens
gtatgtacagg

SEQ ID NO: 1185 - DNA, 11 bp, Homo sapiens
ccctttatatc

SEQ ID NO: 1186 - DNA, 11 bp, Homo sapiens
gctcgtggtca

SEQ ID NO: 1187 - DNA, 11 bp, Homo sapiens
cccatctagct

SEQ ID NO: 1188 - DNA, 11 bp, Homo sapiens
tctcaaaaaaa

SEQ ID NO: 1189 - DNA, 11 bp, Homo sapiens
cccctggctgg

SEQ ID NO: 1190 - DNA, 11 bp, Homo sapiens
ggttatttagt

SEQ ID NO: 1191 - DNA, 11 bp, Homo sapiens
gcaaaacctca

SEQ ID NO: 1192 - DNA, 11 bp, Homo sapiens
agttgtttggt

SEQ ID NO: 1193 - DNA, 11 bp, Homo sapiens
tcatagccttg

SEQ ID NO: 1194 - DNA, 11 bp, Homo sapiens
aggactggact

SEQ ID NO: 1195 - DNA, 11 bp, Homo sapiens
taaacctagga

SEQ ID NO: 1196 - DNA, 11 bp, Homo sapiens
gtggctcactt

SEQ ID NO: 1197 - DNA, 11 bp, Homo sapiens
tcatttggtgt

SEQ ID NO: 1198 - DNA, 11 bp, Homo sapiens
gccttggcagt

SEQ ID NO: 1199 - DNA, 11 bp, Homo sapiens
cccttgttctt

SEQ ID NO: 1200 - DNA, 11 bp, Homo sapiens
gaacagtatga

SEQ ID NO: 1201 - DNA, 11 bp, Homo sapiens
atggcaggcgg

SEQ ID NO: 1202 - DNA, 11 bp, Homo sapiens
acacagcaaga

SEQ ID NO: 1203 - DNA, 11 bp, Homo sapiens
gatcaggccag

SEQ ID NO: 1204 - DNA, 11 bp, Homo sapiens
gtgaaactctg

SEQ ID NO: 1205 - DNA, 11 bp, Homo sapiens
ggcctgcagga

SEQ ID NO: 1206 - DNA, 11 bp, Homo sapiens
aaatcaataca

SEQ ID NO: 1207 - DNA, 11 bp, Homo sapiens
attgtaccact

SEQ ID NO: 1208 - DNA, 11 bp, Homo sapiens
cgcctgtagtc

SEQ ID NO: 1209 - DNA, 11 bp, Homo sapiens
gcaaaacccag

SEQ ID NO: 1210 - DNA, 11 bp, Homo sapiens
ctttgatgcgg

SEQ ID NO: 1211 - DNA, 11 bp, Homo sapiens
ggccctaggca

SEQ ID NO: 1212 - DNA, 11 bp, Homo sapiens
cctggctaatt

SEQ ID NO: 1213 - DNA, 11 bp, Homo sapiens
cttcctggcct

SEQ ID NO: 1214 - DNA, 11 bp, Homo sapiens
gcggggtggag

SEQ ID NO: 1215 - DNA, 11 bp, Homo sapiens
gtggcaggcgc

SEQ ID NO: 1216 - DNA, 11 bp, Homo sapiens
agcccaggagg

SEQ ID NO: 1217 - DNA, 11 bp, Homo sapiens
atagtgccact

SEQ ID NO: 1218 - DNA, 11 bp, Homo sapiens
catttgtaaaa

SEQ ID NO: 1219 - DNA, 11 bp, Homo sapiens
cgtacagcccc

SEQ ID NO: 1220 - DNA, 11 bp, Homo sapiens
gggctacgtcc

SEQ ID NO: 1221 - DNA, 11 bp, Homo sapiens
atcacaccact

SEQ ID NO: 1222 - DNA, 11 bp, Homo sapiens
cactccagcct

SEQ ID NO: 1223 - DNA, 11 bp, Homo sapiens
cttgtaatccc

SEQ ID NO: 1224 - DNA, 11 bp, Homo sapiens
gtgaaacctca

SEQ ID NO: 1225 - DNA, 11 bp, Homo sapiens
atctcagctca

SEQ ID NO: 1226 - DNA, 11 bp, Homo sapiens
tatgtgctgta

SEQ ID NO: 1227 - DNA, 11 bp, Homo sapiens
actcgaatatc

SEQ ID NO: 1228 - DNA, 11 bp, Homo sapiens
gagtccctggt

SEQ ID NO: 1229 - DNA, 11 bp, Homo sapiens
tgcaatatgcc

SEQ ID NO: 1230 - DNA, 11 bp, Homo sapiens
gaagcaataaa

SEQ ID NO: 1231 - DNA, 11 bp, Homo sapiens
gtgaaactccg

SEQ ID NO: 1232 - DNA, 11 bp, Homo sapiens
ggctgccgagt

SEQ ID NO: 1233 - DNA, 11 bp, Homo sapiens
cttagccccag

SEQ ID NO: 1234 - DNA, 11 bp, Homo sapiens
ttattccacaa

SEQ ID NO: 1235 - DNA, 11 bp, Homo sapiens
tcacagccccc

SEQ ID NO: 1236 - DNA, 11 bp, Homo sapiens
ttttccttttg

SEQ ID NO: 1237 - DNA, 11 bp, Homo sapiens
cttgcataaga

SEQ ID NO: 1238 - DNA, 11 bp, Homo sapiens
tatgtgttctc

SEQ ID NO: 1239 - DNA, 11 bp, Homo sapiens
actatcatctt

SEQ ID NO: 1240 - DNA, 11 bp, Homo sapiens
cgcctatagtc

SEQ ID NO: 1241 - DNA, 11 bp, Homo sapiens
cccgccagtgc

SEQ ID NO: 1242 - DNA, 11 bp, Homo sapiens
ttctaattttt

SEQ ID NO: 1243 - DNA, 11 bp, Homo sapiens
cgggaagacat

SEQ ID NO: 1244 - DNA, 11 bp, Homo sapiens
ccagtagtccc

SEQ ID NO: 1245 - DNA, 11 bp, Homo sapiens
cagtttgtgtt

SEQ ID NO: 1246 - DNA, 11 bp, Homo sapiens
tcctttaaaat

SEQ ID NO: 1247 - DNA, 11 bp, Homo sapiens
gtgctaagcgg

SEQ ID NO: 1248 - DNA, 11 bp, Homo sapiens
agaatcacttg

SEQ ID NO: 1249 - DNA, 11 bp, Homo sapiens
gtggtgtacgc

SEQ ID NO: 1250 - DNA, 11 bp, Homo sapiens
gccccagaatc

SEQ ID NO: 1251 - DNA, 11 bp, Homo sapiens
ttgggaggctg

SEQ ID NO: 1252 - DNA, 11 bp, Homo sapiens
gtggcacgcgc

SEQ ID NO: 1253 - DNA, 11 bp, Homo sapiens
caagcgctcta

SEQ ID NO: 1254 - DNA, 11 bp, Homo sapiens
agttcgagacc

SEQ ID NO: 1255 - DNA, 11 bp, Homo sapiens
agaaccaaaaa

SEQ ID NO: 1256 - DNA, 11 bp, Homo sapiens
ctggctatccg

SEQ ID NO: 1257 - DNA, 11 bp, Homo sapiens
tagtcccagct

SEQ ID NO: 1258 - DNA, 11 bp, Homo sapiens
gtgaaatcctg

SEQ ID NO: 1259 - DNA, 11 bp, Homo sapiens
cctgtaattcc

SEQ ID NO: 1260 - DNA, 11 bp, Homo sapiens
cttcttgcccc

SEQ ID NO: 1261 - DNA, 11 bp, Homo sapiens
tggttggtggt

SEQ ID NO: 1262 - DNA, 11 bp, Homo sapiens
cccgtaatccc

SEQ ID NO: 1263 - DNA, 11 bp, Homo sapiens
cctggccagaa

SEQ ID NO: 1264 - DNA, 11 bp, Homo sapiens
cgtgtaatccc

SEQ ID NO: 1265 - DNA, 11 bp, Homo sapiens
gcgaaacctca

SEQ ID NO: 1266 - DNA, 11 bp, Homo sapiens
tggttacaaaa

SEQ ID NO: 1267 - DNA, 11 bp, Homo sapiens
ccacagcactc

SEQ ID NO: 1268 - DNA, 11 bp, Homo sapiens
gtggcacgtgc

SEQ ID NO: 1269 - DNA, 11 bp, Homo sapiens
atgtcttttct

SEQ ID NO: 1270 - DNA, 11 bp, Homo sapiens
cttgtagtccc

SEQ ID NO: 1271 - DNA, 11 bp, Homo sapiens
ctcatctgctg

SEQ ID NO: 1272 - DNA, 11 bp, Homo sapiens
aggacataatt

SEQ ID NO: 1273 - DNA, 11 bp, Homo sapiens
gagctacacca

SEQ ID NO: 1274 - DNA, 11 bp, Homo sapiens
ttgctactaaa

SEQ ID NO: 1275 - DNA, 11 bp, Homo sapiens
cttagtgtttt

SEQ ID NO: 1276 - DNA, 11 bp, Homo sapiens
ctggtcctgga

SEQ ID NO: 1277 - DNA, 11 bp, Homo sapiens
ggtggcagttg

SEQ ID NO: 1278 - DNA, 11 bp, Homo sapiens
ctgatatagac

SEQ ID NO: 1279 - DNA, 11 bp, Homo sapiens
tggaaatcatt

SEQ ID NO: 1280 - DNA, 11 bp, Homo sapiens
actttgaaagg

SEQ ID NO: 1281 - DNA, 11 bp, Homo sapiens
aaaggcactga

SEQ ID NO: 1282 - DNA, 11 bp, Homo sapiens
gttctcttttt

SEQ ID NO: 1283 - DNA, 11 bp, Homo sapiens
agcgcagctgt

SEQ ID NO: 1284 - DNA, 11 bp, Homo sapiens
attgtgaagag

SEQ ID NO: 1285 - DNA, 11 bp, Homo sapiens
gccttcggaaa

SEQ ID NO: 1286 - DNA, 11 bp, Homo sapiens
gctattttgat

SEQ ID NO: 1287 - DNA, 11 bp, Homo sapiens
tatctcttaaa

SEQ ID NO: 1288 - DNA, 11 bp, Homo sapiens
tgtgattttta

SEQ ID NO: 1289 - DNA, 11 bp, Homo sapiens
tatttcagatt

SEQ ID NO: 1290 - DNA, 11 bp, Homo sapiens
atgattttgag

SEQ ID NO: 1291 - DNA, 11 bp, Homo sapiens
aatattcatat

SEQ ID NO: 1292 - DNA, 11 bp, Homo sapiens
agaccccattt

SEQ ID NO: 1293 - DNA, 11 bp, Homo sapiens
cacccatagtc

SEQ ID NO: 1294 - DNA, 11 bp, Homo sapiens
gtcttgctgca

SEQ ID NO: 1295 - DNA, 11 bp, Homo sapiens
cggcccatctg

SEQ ID NO: 1296 - DNA, 11 bp, Homo sapiens
caatctgatgc

SEQ ID NO: 1297 - DNA, 11 bp, Homo sapiens
atgttgggtgt

SEQ ID NO: 1298 - DNA, 11 bp, Homo sapiens
actctgtctcc

SEQ ID NO: 1299 - DNA, 11 bp, Homo sapiens
ggaatacagaa

SEQ ID NO: 1300 - DNA, 11 bp, Homo sapiens
actgggcaagc

SEQ ID NO: 1301 - DNA, 11 bp, Homo sapiens
ggtcagaaatt

SEQ ID NO: 1302 - DNA, 11 bp, Homo sapiens
aaccgaaggga

SEQ ID NO: 1303 - DNA, 11 bp, Homo sapiens
gggatagagac

SEQ ID NO: 1304 - DNA, 11 bp, Homo sapiens
tttcagttagt

SEQ ID NO: 1305 - DNA, 11 bp, Homo sapiens
gctattgatgt

SEQ ID NO: 1306 - DNA, 11 bp, Homo sapiens
aagaggaggcc

SEQ ID NO: 1307 - DNA, 11 bp, Homo sapiens
taatacactaa

SEQ ID NO: 1308 - DNA, 11 bp, Homo sapiens
gcagatgcttt

SEQ ID NO: 1309 - DNA, 11 bp, Homo sapiens
tcacaaggctg

SEQ ID NO: 1310 - DNA, 11 bp, Homo sapiens
tgcgagctggg

SEQ ID NO: 1311 - DNA, 11 bp, Homo sapiens
ggatttgctgc

SEQ ID NO: 1312 - DNA, 11 bp, Homo sapiens
cacgcacacac

SEQ ID NO: 1313 - DNA, 11 bp, Homo sapiens
atgtggactga

SEQ ID NO: 1314 - DNA, 11 bp, Homo sapiens
ggaggcagagc

SEQ ID NO: 1315 - DNA, 11 bp, Homo sapiens
gctttctgtaa

SEQ ID NO: 1316 - DNA, 11 bp, Homo sapiens
tgattatttac

SEQ ID NO: 1317 - DNA, 11 bp, Homo sapiens
acatctgcctg

SEQ ID NO: 1318 - DNA, 11 bp, Homo sapiens
cttagttttaa

SEQ ID NO: 1319 - DNA, 11 bp, Homo sapiens
aggaagagtca

SEQ ID NO: 1320 - DNA, 11 bp, Homo sapiens
caatgcagagg

SEQ ID NO: 1321 - DNA, 11 bp, Homo sapiens
taattcttgta

SEQ ID NO: 1322 - DNA, 11 bp, Homo sapiens
caagggcccac

SEQ ID NO: 1323 - DNA, 11 bp, Homo sapiens
ttttgaagaaa

SEQ ID NO: 1324 - DNA, 11 bp, Homo sapiens
tgtctccgtct

SEQ ID NO: 1325 - DNA, 11 bp, Homo sapiens
ttttcttcagg

SEQ ID NO: 1326 - DNA, 11 bp, Homo sapiens
ttcctccctct

SEQ ID NO: 1327 - DNA, 11 bp, Homo sapiens
tctgcctttct

SEQ ID NO: 1328 - DNA, 11 bp, Homo sapiens
ataactgtcag

SEQ ID NO: 1329 - DNA, 11 bp, Homo sapiens
ttgcagttttt

SEQ ID NO: 1330 - DNA, 11 bp, Homo sapiens
tatttaaaaaa

SEQ ID NO: 1331 - DNA, 11 bp, Homo sapiens
ggctcaggggc

SEQ ID NO: 1332 - DNA, 11 bp, Homo sapiens
tttattgaaac

SEQ ID NO: 1333 - DNA, 11 bp, Homo sapiens
ctggcttaaat

SEQ ID NO: 1334 - DNA, 11 bp, Homo sapiens
gctttatgtgg

SEQ ID NO: 1335 - DNA, 11 bp, Homo sapiens
gcatactttat

SEQ ID NO: 1336 - DNA, 11 bp, Homo sapiens
agaatactgag

SEQ ID NO: 1337 - DNA, 11 bp, Homo sapiens
acccaaaaaaa

SEQ ID NO: 1338 - DNA, 11 bp, Homo sapiens
ggacattaggg

SEQ ID NO: 1339 - DNA, 11 bp, Homo sapiens
aaaaataaatt

SEQ ID NO: 1340 - DNA, 11 bp, Homo sapiens
agatacatagc

SEQ ID NO: 1341 - DNA, 11 bp, Homo sapiens
tggatatcagt

SEQ ID NO: 1342 - DNA, 11 bp, Homo sapiens
ttttccacttt

SEQ ID NO: 1343 - DNA, 11 bp, Homo sapiens
gtggctcaggc

SEQ ID NO: 1344 - DNA, 11 bp, Homo sapiens
cctgtgattcc

SEQ ID NO: 1345 - DNA, 11 bp, Homo sapiens
ggcgacagagc

SEQ ID NO: 1346 - DNA, 11 bp, Homo sapiens
cctgtggtcct

SEQ ID NO: 1347 - DNA, 11 bp, Homo sapiens
tgcctgtggtc

SEQ ID NO: 1348 - DNA, 11 bp, Homo sapiens
gtaaaaaagcc

SEQ ID NO: 1349 - DNA, 11 bp, Homo sapiens
tgtgaacacat

SEQ ID NO: 1350 - DNA, 11 bp, Homo sapiens
aaacgaagttg

SEQ ID NO: 1351 - DNA, 11 bp, Homo sapiens
tacatcagtaa

SEQ ID NO: 1352 - DNA, 11 bp, Homo sapiens
cctgtaggccc

SEQ ID NO: 1353 - DNA, 11 bp, Homo sapiens
gtgagacctcg

SEQ ID NO: 1354 - DNA, 11 bp, Homo sapiens
tgccaccacac

SEQ ID NO: 1355 - DNA, 11 bp, Homo sapiens
gctggattttg

SEQ ID NO: 1356 - DNA, 11 bp, Homo sapiens
tcactttttta

SEQ ID NO: 1357 - DNA, 11 bp, Homo sapiens
attatcctcag

SEQ ID NO: 1358 - DNA, 11 bp, Homo sapiens
ggatccaattt

SEQ ID NO: 1359 - DNA, 11 bp, Homo sapiens
ccaattgaaga

SEQ ID NO: 1360 - DNA, 11 bp, Homo sapiens
ttacttttggt

SEQ ID NO: 1361 - DNA, 11 bp, Homo sapiens
gagagctttgc

SEQ ID NO: 1362 - DNA, 11 bp, Homo sapiens
tacccccaaac

SEQ ID NO: 1363 - DNA, 11 bp, Homo sapiens
gggcagacact

SEQ ID NO: 1364 - DNA, 11 bp, Homo sapiens
atggcgcacgc

SEQ ID NO: 1365 - DNA, 11 bp, Homo sapiens
aggttgccgag

SEQ ID NO: 1366 - DNA, 11 bp, Homo sapiens
ccactgcaccc

SEQ ID NO: 1367 - DNA, 11 bp, Homo sapiens
atggtggggga

SEQ ID NO: 1368 - DNA, 11 bp, Homo sapiens
ccctctccctt

SEQ ID NO: 1369 - DNA, 11 bp, Homo sapiens
tcaccaaaaaa

SEQ ID NO: 1370 - DNA, 11 bp, Homo sapiens
gtgaaaccccc

SEQ ID NO: 1371 - DNA, 11 bp, Homo sapiens
cctgcaatccc

SEQ ID NO: 1372 - DNA, 11 bp, Homo sapiens
gtgaagccccg

SEQ ID NO: 1373 - DNA, 11 bp, Homo sapiens
ccactgtactc

SEQ ID NO: 1374 - DNA, 11 bp, Homo sapiens
gtggtgggcgc

SEQ ID NO: 1375 - DNA, 11 bp, Homo sapiens
agtatgaccta

SEQ ID NO: 1376 - DNA, 11 bp, Homo sapiens
gtgacagccac

SEQ ID NO: 1377 - DNA, 11 bp, Homo sapiens
gggcttttgag

SEQ ID NO: 1378 - DNA, 11 bp, Homo sapiens
gtgagacccct

SEQ ID NO: 1379 - DNA, 11 bp, Homo sapiens
gtggtgcacat

SEQ ID NO: 1380 - DNA, 11 bp, Homo sapiens
cctgtagtcac

SEQ ID NO: 1381 - DNA, 11 bp, Homo sapiens
tggtaactggc

SEQ ID NO: 1382 - DNA, 11 bp, Homo sapiens
gtggtatgtgc

SEQ ID NO: 1383 - DNA, 11 bp, Homo sapiens
gtaagattagc

SEQ ID NO: 1384 - DNA, 11 bp, Homo sapiens
gcgaaacccca

SEQ ID NO: 1385 - DNA, 11 bp, Homo sapiens
atcgtgccact

SEQ ID NO: 1386 - DNA, 11 bp, Homo sapiens
tctgtaatccc

SEQ ID NO: 1387 - DNA, 11 bp, Homo sapiens
ttagccaggct

SEQ ID NO: 1388 - DNA, 11 bp, Homo sapiens
acaaaaccctg

SEQ ID NO: 1389 - DNA, 11 bp, Homo sapiens
atctcggctca

SEQ ID NO: 1390 - DNA, 11 bp, Homo sapiens
cctgtaatgcc

SEQ ID NO: 1391 - DNA, 11 bp, Homo sapiens
ccaccgcactc

SEQ ID NO: 1392 - DNA, 11 bp, Homo sapiens
gtggtgtgtgc

SEQ ID NO: 1393 - DNA, 11 bp, Homo sapiens
atgaaacccca

SEQ ID NO: 1394 - DNA, 11 bp, Homo sapiens
cctgtagcccc

SEQ ID NO: 1395 - DNA, 11 bp, Homo sapiens
tttttaaaaaa

SEQ ID NO: 1396 - DNA, 11 bp, Homo sapiens
aaggagcaagt

SEQ ID NO: 1397 - DNA, 11 bp, Homo sapiens
acttttttatg

SEQ ID NO: 1398 - DNA, 11 bp, Homo sapiens
attgagccaca

SEQ ID NO: 1399 - DNA, 11 bp, Homo sapiens
accacaaaaaa

SEQ ID NO: 1400 - DNA, 11 bp, Homo sapiens
atcacagctca

SEQ ID NO: 1401 - DNA, 11 bp, Homo sapiens
tggttccagct

SEQ ID NO: 1402 - DNA, 11 bp, Homo sapiens
tgactggcttt

SEQ ID NO: 1403 - DNA, 11 bp, Homo sapiens
gtggtggaccc

SEQ ID NO: 1404 - DNA, 11 bp, Homo sapiens
ctgctgtactc

SEQ ID NO: 1405 - DNA, 11 bp, Homo sapiens
atgataattaa

SEQ ID NO: 1406 - DNA, 11 bp, Homo sapiens
taaaataaggg

SEQ ID NO: 1407 - DNA, 11 bp, Homo sapiens
gagagagagaa

SEQ ID NO: 1408 - DNA, 11 bp, Homo sapiens
taccctgaaac

SEQ ID NO: 1409 - DNA, 11 bp, Homo sapiens
actgcccgctg

SEQ ID NO: 1410 - DNA, 11 bp, Homo sapiens
ggtgagcgtgt

SEQ ID NO: 1411 - DNA, 11 bp, Homo sapiens
gtggtggatgc

SEQ ID NO: 1412 - DNA, 11 bp, Homo sapiens
actgtgccact

SEQ ID NO: 1413 - DNA, 11 bp, Homo sapiens
gtggcaggcac

SEQ ID NO: 1414 - DNA, 11 bp, Homo sapiens
cccacttgtaa

SEQ ID NO: 1415 - DNA, 11 bp, Homo sapiens
gccctttctct

SEQ ID NO: 1416 - DNA, 11 bp, Homo sapiens
agacctccttc

SEQ ID NO: 1417 - DNA, 11 bp, Homo sapiens
agtggtggcta

SEQ ID NO: 1418 - DNA, 11 bp, Homo sapiens
ggacagatgta

SEQ ID NO: 1419 - DNA, 11 bp, Homo sapiens
gtggcgagcac

SEQ ID NO: 1420 - DNA, 11 bp, Homo sapiens
atggtgtgtgc

SEQ ID NO: 1421 - DNA, 11 bp, Homo sapiens
ggactgagtca

SEQ ID NO: 1422 - DNA, 11 bp, Homo sapiens
gtgagtgccct

SEQ ID NO: 1423 - DNA, 11 bp, Homo sapiens
gcggaacctca

SEQ ID NO: 1424 - DNA, 11 bp, Homo sapiens
gtgtggggggc

SEQ ID NO: 1425 - DNA, 11 bp, Homo sapiens
gtgaaactcca

SEQ ID NO: 1426 - DNA, 11 bp, Homo sapiens
ccactacactc

SEQ ID NO: 1427 - DNA, 11 bp, Homo sapiens
acggaagtttt

SEQ ID NO: 1428 - DNA, 11 bp, Homo sapiens
gtgaaacccgt

SEQ ID NO: 1429 - DNA, 11 bp, Homo sapiens
tcaaactgtga

SEQ ID NO: 1430 - DNA, 11 bp, Homo sapiens
catcgaaagtt

SEQ ID NO: 1431 - DNA, 11 bp, Homo sapiens
agtaatcatca

SEQ ID NO: 1432 - DNA, 11 bp, Homo sapiens
aataatcctgg

SEQ ID NO: 1433 - DNA, 11 bp, Homo sapiens
gtattcctaaa

SEQ ID NO: 1434 - DNA, 11 bp, Homo sapiens
ctgggaagcat

SEQ ID NO: 1435 - DNA, 11 bp, Homo sapiens
gatcaaaactg

SEQ ID NO: 1436 - DNA, 11 bp, Homo sapiens
gtgacaggcgc

SEQ ID NO: 1437 - DNA, 11 bp, Homo sapiens
gcaccgtggaa

SEQ ID NO: 1438 - DNA, 11 bp, Homo sapiens
ttaactgtatt

SEQ ID NO: 1439 - DNA, 11 bp, Homo sapiens
atgttagagac

SEQ ID NO: 1440 - DNA, 11 bp, Homo sapiens
atcgcatcact

SEQ ID NO: 1441 - DNA, 11 bp, Homo sapiens
gactctggaga

SEQ ID NO: 1442 - DNA, 11 bp, Homo sapiens
aaactgttcaa

SEQ ID NO: 1443 - DNA, 11 bp, Homo sapiens
accaacacggg

SEQ ID NO: 1444 - DNA, 11 bp, Homo sapiens
aaagatgtatc

SEQ ID NO: 1445 - DNA, 11 bp, Homo sapiens
aaaacagcaag

SEQ ID NO: 1446 - DNA, 11 bp, Homo sapiens
ttttcaggtaa

SEQ ID NO: 1447 - DNA, 11 bp, Homo sapiens
tgcctcccagc

SEQ ID NO: 1448 - DNA, 11 bp, Homo sapiens
taagtgaacat

SEQ ID NO: 1449 - DNA, 11 bp, Homo sapiens
ttttgctcaga

SEQ ID NO: 1450 - DNA, 11 bp, Homo sapiens
cattctcccag

SEQ ID NO: 1451 - DNA, 11 bp, Homo sapiens
gtttcagcact

SEQ ID NO: 1452 - DNA, 11 bp, Homo sapiens
gtaactctatg

SEQ ID NO: 1453 - DNA, 11 bp, Homo sapiens
gttctattgta

SEQ ID NO: 1454 - DNA, 11 bp, Homo sapiens
ctatattgtaa

SEQ ID NO: 1455 - DNA, 11 bp, Homo sapiens
gtgaaacattg

SEQ ID NO: 1456 - DNA, 11 bp, Homo sapiens
gtattgaagtt

SEQ ID NO: 1457 - DNA, 11 bp, Homo sapiens
ctttagaagca

SEQ ID NO: 1458 - DNA, 11 bp, Homo sapiens
tgactcctcaa

SEQ ID NO: 1459 - DNA, 11 bp, Homo sapiens
cttttatggac

SEQ ID NO: 1460 - DNA, 11 bp, Homo sapiens
taaatctacaa

SEQ ID NO: 1461 - DNA, 11 bp, Homo sapiens
ttcccaaatga

SEQ ID NO: 1462 - DNA, 11 bp, Homo sapiens
gtaagagttct

SEQ ID NO: 1463 - DNA, 11 bp, Homo sapiens
atgccattgga

SEQ ID NO: 1464 - DNA, 11 bp, Homo sapiens
aggaaatggat

SEQ ID NO: 1465 - DNA, 11 bp, Homo sapiens
aacaagctggg

SEQ ID NO: 1466 - DNA, 11 bp, Homo sapiens
tgcacttgaga

SEQ ID NO: 1467 - DNA, 11 bp, Homo sapiens
gcattctggtt

SEQ ID NO: 1468 - DNA, 11 bp, Homo sapiens
gtggccaccct

SEQ ID NO: 1469 - DNA, 11 bp, Homo sapiens
aaggtggttgt

SEQ ID NO: 1470 - DNA, 11 bp, Homo sapiens
agaactacgtg

SEQ ID NO: 1471 - DNA, 11 bp, Homo sapiens
aatttgggaga

SEQ ID NO: 1472 - DNA, 11 bp, Homo sapiens
gggaaacccct

SEQ ID NO: 1473 - DNA, 11 bp, Homo sapiens
cttactcttga

SEQ ID NO: 1474 - DNA, 11 bp, Homo sapiens
accgtgccact

SEQ ID NO: 1475 - DNA, 11 bp, Homo sapiens
aggctggttta

SEQ ID NO: 1476 - DNA, 11 bp, Homo sapiens
tcttttgggag

SEQ ID NO: 1477 - DNA, 11 bp, Homo sapiens
actgatcttgt

SEQ ID NO: 1478 - DNA, 11 bp, Homo sapiens
aagtctgtaga

SEQ ID NO: 1479 - DNA, 11 bp, Homo sapiens
atggggaaaga

SEQ ID NO: 1480 - DNA, 11 bp, Homo sapiens
acagtgccact

SEQ ID NO: 1481 - DNA, 11 bp, Homo sapiens
tgtggggacaa

SEQ ID NO: 1482 - DNA, 11 bp, Homo sapiens
caagtctccag

SEQ ID NO: 1483 - DNA, 11 bp, Homo sapiens
ttccctccaaa

SEQ ID NO: 1484 - DNA, 11 bp, Homo sapiens
atgtatagggc

SEQ ID NO: 1485 - DNA, 11 bp, Homo sapiens
ggttgttgcgg

SEQ ID NO: 1486 - DNA, 11 bp, Homo sapiens
tcttcttaata

SEQ ID NO: 1487 - DNA, 11 bp, Homo sapiens
gctcatttcag

SEQ ID NO: 1488 - DNA, 11 bp, Homo sapiens
agttccagacc

SEQ ID NO: 1489 - DNA, 11 bp, Homo sapiens
agtcagtggga

SEQ ID NO: 1490 - DNA, 11 bp, Homo sapiens
tttccaatgga

SEQ ID NO: 1491 - DNA, 11 bp, Homo sapiens
tacatttgaat

SEQ ID NO: 1492 - DNA, 11 bp, Homo sapiens
ttttctgtatt

SEQ ID NO: 1493 - DNA, 11 bp, Homo sapiens
agaaagatgga

SEQ ID NO: 1494 - DNA, 11 bp, Homo sapiens
tttacctttgg

SEQ ID NO: 1495 - DNA, 11 bp, Homo sapiens
tacgatattca

SEQ ID NO: 1496 - DNA, 11 bp, Homo sapiens
gcactggggca

SEQ ID NO: 1497 - DNA, 11 bp, Homo sapiens
gctgctagaaa

SEQ ID NO: 1498 - DNA, 11 bp, Homo sapiens
gggtagagagt

SEQ ID NO: 1499 - DNA, 11 bp, Homo sapiens
atcggctccca

SEQ ID NO: 1500 - DNA, 11 bp, Homo sapiens
ataatggagtg

SEQ ID NO: 1501 - DNA, 11 bp, Homo sapiens
gaagaaagact

SEQ ID NO: 1502 - DNA, 11 bp, Homo sapiens
tgcctgacaag

SEQ ID NO: 1503 - DNA, 11 bp, Homo sapiens
ttcctgtaatc

SEQ ID NO: 1504 - DNA, 11 bp, Homo sapiens
aaatattaaac

SEQ ID NO: 1505 - DNA, 11 bp, Homo sapiens
ataaagccgaa

SEQ ID NO: 1506 - DNA, 11 bp, Homo sapiens
aggctgaggcg

SEQ ID NO: 1507 - DNA, 11 bp, Homo sapiens
tagtgctctca

SEQ ID NO: 1508 - DNA, 11 bp, Homo sapiens
ttcataaaaaa

SEQ ID NO: 1509 - DNA, 11 bp, Homo sapiens
gtggctacagt

SEQ ID NO: 1510 - DNA, 11 bp, Homo sapiens
taatctttctt

SEQ ID NO: 1511 - DNA, 11 bp, Homo sapiens
gatggggaaat

SEQ ID NO: 1512 - DNA, 11 bp, Homo sapiens
actaagtgcta

SEQ ID NO: 1513 - DNA, 11 bp, Homo sapiens
cggttatttaa

SEQ ID NO: 1514 - DNA, 11 bp, Homo sapiens
agtgtgggact

SEQ ID NO: 1515 - DNA, 11 bp, Homo sapiens
atagtttagca

SEQ ID NO: 1516 - DNA, 11 bp, Homo sapiens
caccgagacca

SEQ ID NO: 1517 - DNA, 11 bp, Homo sapiens
aaatgacaata

SEQ ID NO: 1518 - DNA, 11 bp, Homo sapiens
tgaccaggcgc

SEQ ID NO: 1519 - DNA, 11 bp, Homo sapiens
gggcatctctt

SEQ ID NO: 1520 - DNA, 11 bp, Homo sapiens
gtggcgggagc

SEQ ID NO: 1521 - DNA, 11 bp, Homo sapiens
gagaaaccccg

SEQ ID NO: 1522 - DNA, 11 bp, Homo sapiens
aaatgcgaaca

SEQ ID NO: 1523 - DNA, 11 bp, Homo sapiens
atccacctgcc

SEQ ID NO: 1524 - DNA, 11 bp, Homo sapiens
gccagctgaca

SEQ ID NO: 1525 - DNA, 11 bp, Homo sapiens
agaaagaatct

SEQ ID NO: 1526 - DNA, 11 bp, Homo sapiens
tgccccttgcc

SEQ ID NO: 1527 - DNA, 11 bp, Homo sapiens
gagaaaccctg

SEQ ID NO: 1528 - DNA, 11 bp, Homo sapiens
ttgctgacttt

SEQ ID NO: 1529 - DNA, 11 bp, Homo sapiens
aggctgaggca

SEQ ID NO: 1530 - DNA, 11 bp, Homo sapiens
tcactgcattc

SEQ ID NO: 1531 - DNA, 11 bp, Homo sapiens
cttaaaaaaaa

SEQ ID NO: 1532 - DNA, 11 bp, Homo sapiens
gtgaaaacctg

SEQ ID NO: 1533 - DNA, 11 bp, Homo sapiens
agccaccgtgc

SEQ ID NO: 1534 - DNA, 11 bp, Homo sapiens
gtggcacatac

SEQ ID NO: 1535 - DNA, 11 bp, Homo sapiens
ccattgtactc

SEQ ID NO: 1536 - DNA, 11 bp, Homo sapiens
tgcctgtaatc

SEQ ID NO: 1537 - DNA, 11 bp, Homo sapiens
ttagccaggat

SEQ ID NO: 1538 - DNA, 11 bp, Homo sapiens
tagggaatgaa

SEQ ID NO: 1539 - DNA, 11 bp, Homo sapiens
aaagcatttct

SEQ ID NO: 1540 - DNA, 11 bp, Homo sapiens
atgacccgcag

SEQ ID NO: 1541 - DNA, 11 bp, Homo sapiens
atttttttcag

SEQ ID NO: 1542 - DNA, 11 bp, Homo sapiens
gcaagccattt

SEQ ID NO: 1543 - DNA, 11 bp, Homo sapiens
gattttttttt

SEQ ID NO: 1544 - DNA, 11 bp, Homo sapiens
tctcttggggt

SEQ ID NO: 1545 - DNA, 11 bp, Homo sapiens
tgtgtgtaaca

SEQ ID NO: 1546 - DNA, 11 bp, Homo sapiens
cctttgtcttt

SEQ ID NO: 1547 - DNA, 11 bp, Homo sapiens
aattgtagtta

SEQ ID NO: 1548 - DNA, 11 bp, Homo sapiens
agccactgtac

SEQ ID NO: 1549 - DNA, 11 bp, Homo sapiens
caaactcaaaa

SEQ ID NO: 1550 - DNA, 11 bp, Homo sapiens
gagcacttggg

SEQ ID NO: 1551 - DNA, 11 bp, Homo sapiens
aagtttttagt

SEQ ID NO: 1552 - DNA, 11 bp, Homo sapiens
tttgaggattg

SEQ ID NO: 1553 - DNA, 11 bp, Homo sapiens
tagttggaact

SEQ ID NO: 1554 - DNA, 11 bp, Homo sapiens
ttgaccaggct

SEQ ID NO: 1555 - DNA, 11 bp, Homo sapiens
cttatttgttt

SEQ ID NO: 1556 - DNA, 11 bp, Homo sapiens
agcttccagcc

SEQ ID NO: 1557 - DNA, 11 bp, Homo sapiens
caccccctcgc

SEQ ID NO: 1558 - DNA, 11 bp, Homo sapiens
tctccaggaca

SEQ ID NO: 1559 - DNA, 11 bp, Homo sapiens
tatttcaattg

SEQ ID NO: 1560 - DNA, 11 bp, Homo sapiens
caggttgaagt

SEQ ID NO: 1561 - DNA, 11 bp, Homo sapiens
tatgttaatgt

SEQ ID NO: 1562 - DNA, 11 bp, Homo sapiens
gactgctctgg

SEQ ID NO: 1563 - DNA, 11 bp, Homo sapiens
gaagagtgctc

SEQ ID NO: 1564 - DNA, 11 bp, Homo sapiens
gagccaaagaa

SEQ ID NO: 1565 - DNA, 11 bp, Homo sapiens
cttgtaatctc

SEQ ID NO: 1566 - DNA, 11 bp, Homo sapiens
ttacaatcaca

SEQ ID NO: 1567 - DNA, 11 bp, Homo sapiens
gtgaaatccag

SEQ ID NO: 1568 - DNA, 11 bp, Homo sapiens
cctgtaatacc

SEQ ID NO: 1569 - DNA, 11 bp, Homo sapiens
aaaagcagaaa

SEQ ID NO: 1570 - DNA, 11 bp, Homo sapiens
tttgggcctaa

SEQ ID NO: 1571 - DNA, 11 bp, Homo sapiens
cctgtggtccc

SEQ ID NO: 1572 - DNA, 11 bp, Homo sapiens
tagctcccttg

SEQ ID NO: 1573 - DNA, 11 bp, Homo sapiens
gtgagaccctg

SEQ ID NO: 1574 - DNA, 11 bp, Homo sapiens
gcgaaaccccg

SEQ ID NO: 1575 - DNA, 11 bp, Homo sapiens
ccactgcattc

SEQ ID NO: 1576 - DNA, 11 bp, Homo sapiens
gggatcgcccc

SEQ ID NO: 1577 - DNA, 11 bp, Homo sapiens
ttccaaggcag

SEQ ID NO: 1578 - DNA, 11 bp, Homo sapiens
atggtgggtgc

SEQ ID NO: 1579 - DNA, 11 bp, Homo sapiens
atcttggctca

SEQ ID NO: 1580 - DNA, 11 bp, Homo sapiens
gtgaaacaccg

SEQ ID NO: 1581 - DNA, 11 bp, Homo sapiens
cgttcattcat

SEQ ID NO: 1582 - DNA, 11 bp, Homo sapiens
ccataatgttg

SEQ ID NO: 1583 - DNA, 11 bp, Homo sapiens
ctctacgcatt

SEQ ID NO: 1584 - DNA, 11 bp, Homo sapiens
atgcagaggtg

SEQ ID NO: 1585 - DNA, 11 bp, Homo sapiens
gccaacagcat

SEQ ID NO: 1586 - DNA, 11 bp, Homo sapiens
cctgtaatcac

SEQ ID NO: 1587 - DNA, 11 bp, Homo sapiens
ggatatgtggt

SEQ ID NO: 1588 - DNA, 11 bp, Homo sapiens
gctcacacctg

SEQ ID NO: 1589 - DNA, 11 bp, Homo sapiens
catacagaaaa

SEQ ID NO: 1590 - DNA, 11 bp, Homo sapiens
tatcccagaac

SEQ ID NO: 1591 - DNA, 11 bp, Homo sapiens
cgcctgtaatc

SEQ ID NO: 1592 - DNA, 11 bp, Homo sapiens
gtggcacacac

SEQ ID NO: 1593 - DNA, 11 bp, Homo sapiens
atcataccact

SEQ ID NO: 1594 - DNA, 11 bp, Homo sapiens
gtggcgtgcac

SEQ ID NO: 1595 - DNA, 11 bp, Homo sapiens
ttgcccaggct

SEQ ID NO: 1596 - DNA, 11 bp, Homo sapiens
ccggtaatccc

SEQ ID NO: 1597 - DNA, 11 bp, Homo sapiens
agccactgtgc

SEQ ID NO: 1598 - DNA, 11 bp, Homo sapiens
gtggtgcacac

SEQ ID NO: 1599 - DNA, 11 bp, Homo sapiens
cccactctttg

SEQ ID NO: 1600 - DNA, 11 bp, Homo sapiens
caaaatcttga

SEQ ID NO: 1601 - DNA, 11 bp, Homo sapiens
cctgtagaccc

SEQ ID NO: 1602 - DNA, 11 bp, Homo sapiens
tcctggttatt

SEQ ID NO: 1603 - DNA, 11 bp, Homo sapiens
tgctagattgg

SEQ ID NO: 1604 - DNA, 11 bp, Homo sapiens
aacccgggaga

SEQ ID NO: 1605 - DNA, 11 bp, Homo sapiens
tactcggttgt

SEQ ID NO: 1606 - DNA, 11 bp, Homo sapiens
gacggggtgga

SEQ ID NO: 1607 - DNA, 11 bp, Homo sapiens
atttgtgtgta

SEQ ID NO: 1608 - DNA, 11 bp, Homo sapiens
gttccaagcaa

SEQ ID NO: 1609 - DNA, 11 bp, Homo sapiens
ctatctgtgga

SEQ ID NO: 1610 - DNA, 11 bp, Homo sapiens
ggcccagagcc

SEQ ID NO: 1611 - DNA, 11 bp, Homo sapiens
ttgatgcccag

SEQ ID NO: 1612 - DNA, 11 bp, Homo sapiens
tattgttaaaa

SEQ ID NO: 1613 - DNA, 11 bp, Homo sapiens
caatctttcaa

SEQ ID NO: 1614 - DNA, 11 bp, Homo sapiens
cttccttgtgt

SEQ ID NO: 1615 - DNA, 11 bp, Homo sapiens
gacagtgatag

SEQ ID NO: 1616 - DNA, 11 bp, Homo sapiens
ggcctctgatg

SEQ ID NO: 1617 - DNA, 11 bp, Homo sapiens
gcctcccccac

SEQ ID NO: 1618 - DNA, 11 bp, Homo sapiens
ggagcagacgc

SEQ ID NO: 1619 - DNA, 11 bp, Homo sapiens
ctgccctctgc

SEQ ID NO: 1620 - DNA, 11 bp, Homo sapiens
ggctcttctgg

SEQ ID NO: 1621 - DNA, 11 bp, Homo sapiens
ttgcaataggt

SEQ ID NO: 1622 - DNA, 11 bp, Homo sapiens
tgatgatcatt

SEQ ID NO: 1623 - DNA, 11 bp, Homo sapiens
cccaaacggta

SEQ ID NO: 1624 - DNA, 11 bp, Homo sapiens
ttggccaagat

SEQ ID NO: 1625 - DNA, 11 bp, Homo sapiens
tttacctgttg

SEQ ID NO: 1626 - DNA, 11 bp, Homo sapiens
tgtcaatgggg

SEQ ID NO: 1627 - DNA, 11 bp, Homo sapiens
cttccgggtaa

SEQ ID NO: 1628 - DNA, 11 bp, Homo sapiens
aaggttcttct

SEQ ID NO: 1629 - DNA, 11 bp, Homo sapiens
taattttaaac

SEQ ID NO: 1630 - DNA, 11 bp, Homo sapiens
ttaaatgctct

SEQ ID NO: 1631 - DNA, 11 bp, Homo sapiens
agctcccaaga

SEQ ID NO: 1632 - DNA, 11 bp, Homo sapiens
tgctgcggaag

SEQ ID NO: 1633 - DNA, 11 bp, Homo sapiens
gagcagtgctg

SEQ ID NO: 1634 - DNA, 11 bp, Homo sapiens
caaggaaatgt

SEQ ID NO: 1635 - DNA, 11 bp, Homo sapiens
gcaacaccgga

SEQ ID NO: 1636 - DNA, 11 bp, Homo sapiens
gccaaagatgt

SEQ ID NO: 1637 - DNA, 11 bp, Homo sapiens
gttgcaggcgc

SEQ ID NO: 1638 - DNA, 11 bp, Homo sapiens
tctttaaaaaa

SEQ ID NO: 1639 - DNA, 11 bp, Homo sapiens
tgtgcttctag

SEQ ID NO: 1640 - DNA, 11 bp, Homo sapiens
tatcaaaaaaa

SEQ ID NO: 1641 - DNA, 11 bp, Homo sapiens
taactcctagt

SEQ ID NO: 1642 - DNA, 11 bp, Homo sapiens
tgatattaaag

SEQ ID NO: 1643 - DNA, 11 bp, Homo sapiens
aaaccaatttt

SEQ ID NO: 1644 - DNA, 11 bp, Homo sapiens
aagaactcagg

SEQ ID NO: 1645 - DNA, 11 bp, Homo sapiens
cagtcccaaaa

SEQ ID NO: 1646 - DNA, 11 bp, Homo sapiens
aaaccggtccc

SEQ ID NO: 1647 - DNA, 11 bp, Homo sapiens
aacattcctaa

SEQ ID NO: 1648 - DNA, 11 bp, Homo sapiens
ttaacatttat

SEQ ID NO: 1649 - DNA, 11 bp, Homo sapiens
atggcgtgtgc

SEQ ID NO: 1650 - DNA, 11 bp, Homo sapiens
gagctcttcct

SEQ ID NO: 1651 - DNA, 11 bp, Homo sapiens
gcaagaccttg

SEQ ID NO: 1652 - DNA, 11 bp, Homo sapiens
aggttaagaga

SEQ ID NO: 1653 - DNA, 11 bp, Homo sapiens
cccgtaatctc

SEQ ID NO: 1654 - DNA, 11 bp, Homo sapiens
gcggcacgcac

SEQ ID NO: 1655 - DNA, 11 bp, Homo sapiens
gacttccagca

SEQ ID NO: 1656 - DNA, 11 bp, Homo sapiens
gctgttctaag

SEQ ID NO: 1657 - DNA, 11 bp, Homo sapiens
gcactgagaag

SEQ ID NO: 1658 - DNA, 11 bp, Homo sapiens
gcgagaccttg

SEQ ID NO: 1659 - DNA, 11 bp, Homo sapiens
ttgcattctcc

SEQ ID NO: 1660 - DNA, 11 bp, Homo sapiens
tgcttgtagtc

SEQ ID NO: 1661 - DNA, 11 bp, Homo sapiens
aacgcagcctt

SEQ ID NO: 1662 - DNA, 11 bp, Homo sapiens
taggaaacctg

SEQ ID NO: 1663 - DNA, 11 bp, Homo sapiens
ggctttattct

SEQ ID NO: 1664 - DNA, 11 bp, Homo sapiens
aatacttctct

SEQ ID NO: 1665 - DNA, 11 bp, Homo sapiens
ggtgacagagg

SEQ ID NO: 1666 - DNA, 11 bp, Homo sapiens
agaaaaaaaat

SEQ ID NO: 1667 - DNA, 11 bp, Homo sapiens
cattggcactc

SEQ ID NO: 1668 - DNA, 11 bp, Homo sapiens
ttaattagcaa

SEQ ID NO: 1669 - DNA, 11 bp, Homo sapiens
cgcgtcagagc

SEQ ID NO: 1670 - DNA, 11 bp, Homo sapiens
aaaactcgccg

SEQ ID NO: 1671 - DNA, 11 bp, Homo sapiens
tgtactttcct

SEQ ID NO: 1672 - DNA, 11 bp, Homo sapiens
cagactgggag

SEQ ID NO: 1673 - DNA, 11 bp, Homo sapiens
tttctgaaggg

SEQ ID NO: 1674 - DNA, 11 bp, Homo sapiens
taaataaggaa

SEQ ID NO: 1675 - DNA, 11 bp, Homo sapiens
gatgacagagt

SEQ ID NO: 1676 - DNA, 11 bp, Homo sapiens
gttaccgagtg

SEQ ID NO: 1677 - DNA, 11 bp, Homo sapiens
ggtcaaatcat

SEQ ID NO: 1678 - DNA, 11 bp, Homo sapiens
gcttcacttcc

SEQ ID NO: 1679 - DNA, 11 bp, Homo sapiens
gacaatacacc

SEQ ID NO: 1680 - DNA, 11 bp, Homo sapiens
ttccaaaaaaa

SEQ ID NO: 1681 - DNA, 11 bp, Homo sapiens
tgtgacccctc

SEQ ID NO: 1682 - DNA, 11 bp, Homo sapiens
tttgtgccatt

SEQ ID NO: 1683 - DNA, 11 bp, Homo sapiens
ccttgccctat

SEQ ID NO: 1684 - DNA, 11 bp, Homo sapiens
agaacaaataa

SEQ ID NO: 1685 - DNA, 11 bp, Homo sapiens
agactgtactg

SEQ ID NO: 1686 - DNA, 11 bp, Homo sapiens
ccatcccagtg

SEQ ID NO: 1687 - DNA, 11 bp, Homo sapiens
acagactgtta

SEQ ID NO: 1688 - DNA, 11 bp, Homo sapiens
ggcgacccatt

SEQ ID NO: 1689 - DNA, 11 bp, Homo sapiens
caggtcccatt

SEQ ID NO: 1690 - DNA, 11 bp, Homo sapiens
acaaagaaaag

SEQ ID NO: 1691 - DNA, 11 bp, Homo sapiens
actgatgctca

SEQ ID NO: 1692 - DNA, 11 bp, Homo sapiens
tcctctttcaa

SEQ ID NO: 1693 - DNA, 11 bp, Homo sapiens
aggcagcactg

SEQ ID NO: 1694 - DNA, 11 bp, Homo sapiens
ctactgcactc

SEQ ID NO: 1695 - DNA, 11 bp, Homo sapiens
cccagctaatt

SEQ ID NO: 1696 - DNA, 11 bp, Homo sapiens
gtggcacgcac

SEQ ID NO: 1697 - DNA, 11 bp, Homo sapiens
gcaaaatccca

SEQ ID NO: 1698 - DNA, 11 bp, Homo sapiens
gtgaaaccttg

SEQ ID NO: 1699 - DNA, 11 bp, Homo sapiens
actgtaatccc

SEQ ID NO: 1700 - DNA, 11 bp, Homo sapiens
atcgcaccact

SEQ ID NO: 1701 - DNA, 11 bp, Homo sapiens
gggaaacccca

SEQ ID NO: 1702 - DNA, 11 bp, Homo sapiens
gtgaaacccct

SEQ ID NO: 1703 - DNA, 11 bp, Homo sapiens
cagcagcaaaa

SEQ ID NO: 1704 - DNA, 11 bp, Homo sapiens
tagaagccaac

SEQ ID NO: 1705 - DNA, 11 bp, Homo sapiens
ttctttttctt

SEQ ID NO: 1706 - DNA, 11 bp, Homo sapiens
cctataatcct

SEQ ID NO: 1707 - DNA, 11 bp, Homo sapiens
taaacgtggca

SEQ ID NO: 1708 - DNA, 11 bp, Homo sapiens
cagaagtcttc

SEQ ID NO: 1709 - DNA, 11 bp, Homo sapiens
accagccaaag

SEQ ID NO: 1710 - DNA, 11 bp, Homo sapiens
gaaatggggaa

SEQ ID NO: 1711 - DNA, 11 bp, Homo sapiens
gtgtggtattc

SEQ ID NO: 1712 - DNA, 11 bp, Homo sapiens
ccgagtttttg

SEQ ID NO: 1713 - DNA, 11 bp, Homo sapiens
ggcaaacttta

SEQ ID NO: 1714 - DNA, 11 bp, Homo sapiens
ccacaggggat

SEQ ID NO: 1715 - DNA, 11 bp, Homo sapiens
cctgtggtctc

SEQ ID NO: 1716 - DNA, 11 bp, Homo sapiens
caccaccacgc

SEQ ID NO: 1717 - DNA, 11 bp, Homo sapiens
gtgaaacccgg

SEQ ID NO: 1718 - DNA, 11 bp, Homo sapiens
gtgaaacccta

SEQ ID NO: 1719 - DNA, 11 bp, Homo sapiens
atatgtatatt

SEQ ID NO: 1720 - DNA, 11 bp, Homo sapiens
gtgaaaccaca

SEQ ID NO: 1721 - DNA, 11 bp, Homo sapiens
gggattaaagc

SEQ ID NO: 1722 - DNA, 11 bp, Homo sapiens
tacctttgcta

SEQ ID NO: 1723 - DNA, 11 bp, Homo sapiens
aatgaatgaaa

SEQ ID NO: 1724 - DNA, 11 bp, Homo sapiens
atatttcattc

SEQ ID NO: 1725 - DNA, 11 bp, Homo sapiens
tggaggggcag

SEQ ID NO: 1726 - DNA, 11 bp, Homo sapiens
tcgcgcaataa

SEQ ID NO: 1727 - DNA, 11 bp, Homo sapiens
ctcaaaatcaa

SEQ ID NO: 1728 - DNA, 11 bp, Homo sapiens
tgtacatatgt

SEQ ID NO: 1729 - DNA, 11 bp, Homo sapiens
tgcaatgttgt

SEQ ID NO: 1730 - DNA, 11 bp, Homo sapiens
tcattttgtga

SEQ ID NO: 1731 - DNA, 11 bp, Homo sapiens
taaaacgtgaa

SEQ ID NO: 1732 - DNA, 11 bp, Homo sapiens
tcatctgcaaa

SEQ ID NO: 1733 - DNA, 11 bp, Homo sapiens
ggcaaaatcta

SEQ ID NO: 1734 - DNA, 11 bp, Homo sapiens
gacctatctct

SEQ ID NO: 1735 - DNA, 11 bp, Homo sapiens
gtggtgcgtgc

SEQ ID NO: 1736 - DNA, 11 bp, Homo sapiens
tcttgaacagc

SEQ ID NO: 1737 - DNA, 11 bp, Homo sapiens
ggctttggtct

SEQ ID NO: 1738 - DNA, 11 bp, Homo sapiens
ccaccacaccc

SEQ ID NO: 1739 - DNA, 11 bp, Homo sapiens
atgaaaccccg

SEQ ID NO: 1740 - DNA, 11 bp, Homo sapiens
ccactgcactg

SEQ ID NO: 1741 - DNA, 11 bp, Homo sapiens
ccactgcgctc

SEQ ID NO: 1742 - DNA, 11 bp, Homo sapiens
gagaaacccca

SEQ ID NO: 1743 - DNA, 11 bp, Homo sapiens
cctgtaatcct

SEQ ID NO: 1744 - DNA, 11 bp, Homo sapiens
gacagtcggtg

SEQ ID NO: 1745 - DNA, 11 bp, Homo sapiens
ttttctctgaa

SEQ ID NO: 1746 - DNA, 11 bp, Homo sapiens
ttggctaggcc

SEQ ID NO: 1747 - DNA, 11 bp, Homo sapiens
cccttgtccga

SEQ ID NO: 1748 - DNA, 11 bp, Homo sapiens
agcccaggagt

SEQ ID NO: 1749 - DNA, 11 bp, Homo sapiens
gtggtgtgcac

SEQ ID NO: 1750 - DNA, 11 bp, Homo sapiens
cctgtgatcct

SEQ ID NO: 1751 - DNA, 11 bp, Homo sapiens
cctgtaaaccc

SEQ ID NO: 1752 - DNA, 11 bp, Homo sapiens
tcaataaaacc

SEQ ID NO: 1753 - DNA, 11 bp, Homo sapiens
acgaaacccca

SEQ ID NO: 1754 - DNA, 11 bp, Homo sapiens
tgaccaccctt

SEQ ID NO: 1755 - DNA, 11 bp, Homo sapiens
ctcgaataaaa

SEQ ID NO: 1756 - DNA, 11 bp, Homo sapiens
cgactgcactc

SEQ ID NO: 1757 - DNA, 11 bp, Homo sapiens
cagaataatgt

SEQ ID NO: 1758 - DNA, 11 bp, Homo sapiens
cagaaggccac

SEQ ID NO: 1759 - DNA, 11 bp, Homo sapiens
gaaagagctct

SEQ ID NO: 1760 - DNA, 11 bp, Homo sapiens
aaaattatctt

SEQ ID NO: 1761 - DNA, 11 bp, Homo sapiens
ggtgtctgtgg

SEQ ID NO: 1762 - DNA, 11 bp, Homo sapiens
aactgagaagt

SEQ ID NO: 1763 - DNA, 11 bp, Homo sapiens
tgagtggtttg

SEQ ID NO: 1764 - DNA, 11 bp, Homo sapiens
gaagttgcctt

SEQ ID NO: 1765 - DNA, 11 bp, Homo sapiens
ttgttaagcct

SEQ ID NO: 1766 - DNA, 11 bp, Homo sapiens
tatctcagaac

SEQ ID NO: 1767 - DNA, 11 bp, Homo sapiens
ggtgaatttta

SEQ ID NO: 1768 - DNA, 11 bp, Homo sapiens
tgagcacataa

SEQ ID NO: 1769 - DNA, 11 bp, Homo sapiens
gtgcgtgcctg

SEQ ID NO: 1770 - DNA, 11 bp, Homo sapiens
attatccagcg

SEQ ID NO: 1771 - DNA, 11 bp, Homo sapiens
tcttctttcag

SEQ ID NO: 1772 - DNA, 11 bp, Homo sapiens
ctctccaaacc

SEQ ID NO: 1773 - DNA, 11 bp, Homo sapiens
ccattgctctc

SEQ ID NO: 1774 - DNA, 11 bp, Homo sapiens
aagatccttgt

SEQ ID NO: 1775 - DNA, 11 bp, Homo sapiens
ggaacttggct

SEQ ID NO: 1776 - DNA, 11 bp, Homo sapiens
agtttgtcacc

SEQ ID NO: 1777 - DNA, 11 bp, Homo sapiens
tccacagtggg

SEQ ID NO: 1778 - DNA, 11 bp, Homo sapiens
tacccctctca

SEQ ID NO: 1779 - DNA, 11 bp, Homo sapiens
aaagatgtaca

SEQ ID NO: 1780 - DNA, 11 bp, Homo sapiens
atttataatcc

SEQ ID NO: 1781 - DNA, 11 bp, Homo sapiens
actgtttgttt

SEQ ID NO: 1782 - DNA, 11 bp, Homo sapiens
tcgatgtggcg

SEQ ID NO: 1783 - DNA, 11 bp, Homo sapiens
ttaagatcttc

SEQ ID NO: 1784 - DNA, 11 bp, Homo sapiens
ttcttgtcata

SEQ ID NO: 1785 - DNA, 11 bp, Homo sapiens
aacaattatca

SEQ ID NO: 1786 - DNA, 11 bp, Homo sapiens
agaaacactca

SEQ ID NO: 1787 - DNA, 11 bp, Homo sapiens
agaaataaaaa

SEQ ID NO: 1788 - DNA, 11 bp, Homo sapiens
taagtgtggtt

SEQ ID NO: 1789 - DNA, 11 bp, Homo sapiens
aggagagagcc

SEQ ID NO: 1790 - DNA, 11 bp, Homo sapiens
tggacaagtca

SEQ ID NO: 1791 - DNA, 11 bp, Homo sapiens
ttaaactgctg

SEQ ID NO: 1792 - DNA, 11 bp, Homo sapiens
agacctcactg

SEQ ID NO: 1793 - DNA, 11 bp, Homo sapiens
tatttgtattt

SEQ ID NO: 1794 - DNA, 11 bp, Homo sapiens
tggatagattc

SEQ ID NO: 1795 - DNA, 11 bp, Homo sapiens
ttgattgattt

SEQ ID NO: 1796 - DNA, 11 bp, Homo sapiens
actatattgtg

SEQ ID NO: 1797 - DNA, 11 bp, Homo sapiens
gagtccggcct

SEQ ID NO: 1798 - DNA, 11 bp, Homo sapiens
tatttattttt

SEQ ID NO: 1799 - DNA, 11 bp, Homo sapiens
tgacatcctga

SEQ ID NO: 1800 - DNA, 11 bp, Homo sapiens
ctgcaaggaca

SEQ ID NO: 1801 - DNA, 11 bp, Homo sapiens
atcccccagaa

SEQ ID NO: 1802 - DNA, 11 bp, Homo sapiens
ccactgcgctt

SEQ ID NO: 1803 - DNA, 11 bp, Homo sapiens
tgccagaccct

SEQ ID NO: 1804 - DNA, 11 bp, Homo sapiens
ggtgtgcacct

SEQ ID NO: 1805 - DNA, 11 bp, Homo sapiens
cttttattttt

SEQ ID NO: 1806 - DNA, 11 bp, Homo sapiens
agcgctgggga

SEQ ID NO: 1807 - DNA, 11 bp, Homo sapiens
ctaggacctgt

SEQ ID NO: 1808 - DNA, 11 bp, Homo sapiens
tagtcctagct

SEQ ID NO: 1809 - DNA, 11 bp, Homo sapiens
atttaatttta

SEQ ID NO: 1810 - DNA, 11 bp, Homo sapiens
ggcaacaaagt

SEQ ID NO: 1811 - DNA, 11 bp, Homo sapiens
ctgtaaggatc

SEQ ID NO: 1812 - DNA, 11 bp, Homo sapiens
agtcttccagt

SEQ ID NO: 1813 - DNA, 11 bp, Homo sapiens
gctccccctcc

SEQ ID NO: 1814 - DNA, 11 bp, Homo sapiens
agtatttatga

SEQ ID NO: 1815 - DNA, 11 bp, Homo sapiens
gctaaaccctg

SEQ ID NO: 1816 - DNA, 11 bp, Homo sapiens
ccagcattacc

SEQ ID NO: 1817 - DNA, 11 bp, Homo sapiens
cctgcaatctc

SEQ ID NO: 1818 - DNA, 11 bp, Homo sapiens
gaaaaatgcgc

SEQ ID NO: 1819 - DNA, 11 bp, Homo sapiens
gccagggctca

SEQ ID NO: 1820 - DNA, 11 bp, Homo sapiens
taaaacttaca

SEQ ID NO: 1821 - DNA, 11 bp, Homo sapiens
accctttttat

SEQ ID NO: 1822 - DNA, 11 bp, Homo sapiens
gtttcaaacga

SEQ ID NO: 1823 - DNA, 11 bp, Homo sapiens
cagtctcagtg

SEQ ID NO: 1824 - DNA, 11 bp, Homo sapiens
aaaaattcatc

SEQ ID NO: 1825 - DNA, 11 bp, Homo sapiens
taaataaacaa

SEQ ID NO: 1826 - DNA, 11 bp, Homo sapiens
cacctcaaaca

SEQ ID NO: 1827 - DNA, 11 bp, Homo sapiens
aatgtcctcgg

SEQ ID NO: 1828 - DNA, 11 bp, Homo sapiens
tgtaccccgct

SEQ ID NO: 1829 - DNA, 11 bp, Homo sapiens
cgggtttgtgc

SEQ ID NO: 1830 - DNA, 11 bp, Homo sapiens
gtccatcttaa

SEQ ID NO: 1831 - DNA, 11 bp, Homo sapiens
tttatttttag

SEQ ID NO: 1832 - DNA, 11 bp, Homo sapiens
cctaaaaaaaa

SEQ ID NO: 1833 - DNA, 11 bp, Homo sapiens
tgatcgagctt

SEQ ID NO: 1834 - DNA, 11 bp, Homo sapiens
gaagatattcc

SEQ ID NO: 1835 - DNA, 11 bp, Homo sapiens
atggagctgca

SEQ ID NO: 1836 - DNA, 11 bp, Homo sapiens
ataagacctta

SEQ ID NO: 1837 - DNA, 11 bp, Homo sapiens
caagccaaaaa

SEQ ID NO: 1838 - DNA, 11 bp, Homo sapiens
caaatggcaaa

SEQ ID NO: 1839 - DNA, 11 bp, Homo sapiens
gaagtttaaat

SEQ ID NO: 1840 - DNA, 11 bp, Homo sapiens
gaaggcaagat

SEQ ID NO: 1841 - DNA, 11 bp, Homo sapiens
ttagttatgac

SEQ ID NO: 1842 - DNA, 11 bp, Homo sapiens
ctgtatgttta

SEQ ID NO: 1843 - DNA, 11 bp, Homo sapiens
acctgcattcc

SEQ ID NO: 1844 - DNA, 11 bp, Homo sapiens
ccagctgcctg

SEQ ID NO: 1845 - DNA, 11 bp, Homo sapiens
aaaagtggtgt

SEQ ID NO: 1846 - DNA, 11 bp, Homo sapiens
tttatctgata

SEQ ID NO: 1847 - DNA, 11 bp, Homo sapiens
tattttaccta

SEQ ID NO: 1848 - DNA, 11 bp, Homo sapiens
acctccacacg

SEQ ID NO: 1849 - DNA, 11 bp, Homo sapiens
gattgctgtgc

SEQ ID NO: 1850 - DNA, 11 bp, Homo sapiens
tgaagcagaaa

SEQ ID NO: 1851 - DNA, 11 bp, Homo sapiens
attgtgccact

SEQ ID NO: 1852 - DNA, 11 bp, Homo sapiens
tcggagctgtt

SEQ ID NO: 1853 - DNA, 11 bp, Homo sapiens
gtggtgtgcgc

SEQ ID NO: 1854 - DNA, 11 bp, Homo sapiens
tgctacgaaaa

SEQ ID NO: 1855 - DNA, 11 bp, Homo sapiens
cctggcctaaa

SEQ ID NO: 1856 - DNA, 11 bp, Homo sapiens
ttcactgtgag

SEQ ID NO: 1857 - DNA, 11 bp, Homo sapiens
ccctaccctgt

SEQ ID NO: 1858 - DNA, 11 bp, Homo sapiens
gtggcgtgcgc

SEQ ID NO: 1859 - DNA, 11 bp, Homo sapiens
agccaccacac

SEQ ID NO: 1860 - DNA, 11 bp, Homo sapiens
tctactaaaaa

SEQ ID NO: 1861 - DNA, 11 bp, Homo sapiens
gccgggcacgg

SEQ ID NO: 1862 - DNA, 11 bp, Homo sapiens
gtgctcaaacc

SEQ ID NO: 1863 - DNA, 11 bp, Homo sapiens
ccactgcactt

SEQ ID NO: 1864 - DNA, 11 bp, Homo sapiens
gtggcggacgc

SEQ ID NO: 1865 - DNA, 11 bp, Homo sapiens
ccactgccctc

SEQ ID NO: 1866 - DNA, 11 bp, Homo sapiens
gtggcgtgtgc

SEQ ID NO: 1867 - DNA, 11 bp, Homo sapiens
tctgtagtccc

SEQ ID NO: 1868 - DNA, 11 bp, Homo sapiens
ctaatttaact

SEQ ID NO: 1869 - DNA, 11 bp, Homo sapiens
gtctcagtcat

SEQ ID NO: 1870 - DNA, 11 bp, Homo sapiens
gacagtcactc

SEQ ID NO: 1871 - DNA, 11 bp, Homo sapiens
cctgtagtcca

SEQ ID NO: 1872 - DNA, 11 bp, Homo sapiens
cagagttgtat

SEQ ID NO: 1873 - DNA, 11 bp, Homo sapiens
ggctgagctca

SEQ ID NO: 1874 - DNA, 11 bp, Homo sapiens
gctttctcaaa

SEQ ID NO: 1875 - DNA, 11 bp, Homo sapiens
cctgtagtcct

SEQ ID NO: 1876 - DNA, 11 bp, Homo sapiens
gtgaaacactg

SEQ ID NO: 1877 - DNA, 11 bp, Homo sapiens
gtgaagcccca

SEQ ID NO: 1878 - DNA, 11 bp, Homo sapiens
cctgtattccc

SEQ ID NO: 1879 - DNA, 11 bp, Homo sapiens
ttcagtgcctg

SEQ ID NO: 1880 - DNA, 11 bp, Homo sapiens
gggaaacaggt

SEQ ID NO: 1881 - DNA, 11 bp, Homo sapiens
ccttttttttt

SEQ ID NO: 1882 - DNA, 11 bp, Homo sapiens
ggggcttagga

SEQ ID NO: 1883 - DNA, 11 bp, Homo sapiens
ctagacagtaa

SEQ ID NO: 1884 - DNA, 11 bp, Homo sapiens
gtgttctgtgc

SEQ ID NO: 1885 - DNA, 11 bp, Homo sapiens
tgctgtaaagg

SEQ ID NO: 1886 - DNA, 11 bp, Homo sapiens
gaggagtgggt

SEQ ID NO: 1887 - DNA, 11 bp, Homo sapiens
gtaagaccctg

SEQ ID NO: 1888 - DNA, 11 bp, Homo sapiens
ggccgttagaa

SEQ ID NO: 1889 - DNA, 11 bp, Homo sapiens
aggctaaaagc

SEQ ID NO: 1890 - DNA, 11 bp, Homo sapiens
ctgtgtaattt

SEQ ID NO: 1891 - DNA, 11 bp, Homo sapiens
ctgaagcgtgc

SEQ ID NO: 1892 - DNA, 11 bp, Homo sapiens
agaaccttcaa

SEQ ID NO: 1893 - DNA, 11 bp, Homo sapiens
ttctgtgctgg

SEQ ID NO: 1894 - DNA, 11 bp, Homo sapiens
ttagctgagtc

SEQ ID NO: 1895 - DNA, 11 bp, Homo sapiens
ttggccagact

SEQ ID NO: 1896 - DNA, 11 bp, Homo sapiens
tttcattgcct

SEQ ID NO: 1897 - DNA, 11 bp, Homo sapiens
gtggccagagg

SEQ ID NO: 1898 - DNA, 11 bp, Homo sapiens
accgttctgta

SEQ ID NO: 1899 - DNA, 11 bp, Homo sapiens
taactccaaag

SEQ ID NO: 1900 - DNA, 11 bp, Homo sapiens
tgccgtaaatg

SEQ ID NO: 1901 - DNA, 11 bp, Homo sapiens
tgaactttcct

SEQ ID NO: 1902 - DNA, 11 bp, Homo sapiens
taaagatcctc

SEQ ID NO: 1903 - DNA, 11 bp, Homo sapiens
gtggctcacac

SEQ ID NO: 1904 - DNA, 11 bp, Homo sapiens
gtggtacacac

SEQ ID NO: 1905 - DNA, 11 bp, Homo sapiens
gatctcttggg

SEQ ID NO: 1906 - DNA, 11 bp, Homo sapiens
gaggaactcaa

SEQ ID NO: 1907 - DNA, 11 bp, Homo sapiens
aataaagcctt

SEQ ID NO: 1908 - DNA, 11 bp, Homo sapiens
tttacaagtta

SEQ ID NO: 1909 - DNA, 11 bp, Homo sapiens
aggtcaaaaaa

SEQ ID NO: 1910 - DNA, 11 bp, Homo sapiens
gagcccccgtg

SEQ ID NO: 1911 - DNA, 11 bp, Homo sapiens
gagtagctgag

SEQ ID NO: 1912 - DNA, 11 bp, Homo sapiens
gtgctgctcca

SEQ ID NO: 1913 - DNA, 11 bp, Homo sapiens
gagatttgttt

SEQ ID NO: 1914 - DNA, 11 bp, Homo sapiens
gaaggggtgct

SEQ ID NO: 1915 - DNA, 11 bp, Homo sapiens
gccacagtaca

SEQ ID NO: 1916 - DNA, 11 bp, Homo sapiens
taatttttact

SEQ ID NO: 1917 - DNA, 11 bp, Homo sapiens
actgtttggca

SEQ ID NO: 1918 - DNA, 11 bp, Homo sapiens
tctggctaatt

SEQ ID NO: 1919 - DNA, 11 bp, Homo sapiens
gtggaaaccca

SEQ ID NO: 1920 - DNA, 11 bp, Homo sapiens
ttgcccaagct

SEQ ID NO: 1921 - DNA, 11 bp, Homo sapiens
aaaacagtggc

SEQ ID NO: 1922 - DNA, 11 bp, Homo sapiens
tgatgtgatag

SEQ ID NO: 1923 - DNA, 11 bp, Homo sapiens
tttgaaccctt

SEQ ID NO: 1924 - DNA, 11 bp, Homo sapiens
cctataataaa

SEQ ID NO: 1925 - DNA, 11 bp, Homo sapiens
agaatcactta

SEQ ID NO: 1926 - DNA, 11 bp, Homo sapiens
tattttgcaaa

SEQ ID NO: 1927 - DNA, 11 bp, Homo sapiens
cctataacccc

SEQ ID NO: 1928 - DNA, 11 bp, Homo sapiens
tccaactacac

SEQ ID NO: 1929 - DNA, 11 bp, Homo sapiens
tacccaaagaa

SEQ ID NO: 1930 - DNA, 11 bp, Homo sapiens
tgtttgtaaaa

SEQ ID NO: 1931 - DNA, 11 bp, Homo sapiens
ttttttttttc

SEQ ID NO: 1932 - DNA, 11 bp, Homo sapiens
tatctctgcaa

SEQ ID NO: 1933 - DNA, 11 bp, Homo sapiens
ttcttctgaaa

SEQ ID NO: 1934 - DNA, 11 bp, Homo sapiens
cagatgtttaa

SEQ ID NO: 1935 - DNA, 11 bp, Homo sapiens
tttgtaatatt

SEQ ID NO: 1936 - DNA, 11 bp, Homo sapiens
acccagttgtt

SEQ ID NO: 1937 - DNA, 11 bp, Homo sapiens
ctcattggtgg

SEQ ID NO: 1938 - DNA, 11 bp, Homo sapiens
tcttctcacaa

SEQ ID NO: 1939 - DNA, 11 bp, Homo sapiens
cctttgttcaa

SEQ ID NO: 1940 - DNA, 11 bp, Homo sapiens
ttagagattcc

SEQ ID NO: 1941 - DNA, 11 bp, Homo sapiens
tccacaccaaa

SEQ ID NO: 1942 - DNA, 11 bp, Homo sapiens
tgtaatggttt

SEQ ID NO: 1943 - DNA, 11 bp, Homo sapiens
gtacttacctt

SEQ ID NO: 1944 - DNA, 11 bp, Homo sapiens
cttaaatggtt

SEQ ID NO: 1945 - DNA, 11 bp, Homo sapiens
ctccaacctga

SEQ ID NO: 1946 - DNA, 11 bp, Homo sapiens
ttaggctttag

SEQ ID NO: 1947 - DNA, 11 bp, Homo sapiens
gaagatgtacg

SEQ ID NO: 1948 - DNA, 11 bp, Homo sapiens
tgccaccatac

SEQ ID NO: 1949 - DNA, 11 bp, Homo sapiens
tgtctgtagtc

SEQ ID NO: 1950 - DNA, 11 bp, Homo sapiens
taaagtccatt

SEQ ID NO: 1951 - DNA, 11 bp, Homo sapiens
ccaactgactt

SEQ ID NO: 1952 - DNA, 11 bp, Homo sapiens
atggaatgcta

SEQ ID NO: 1953 - DNA, 11 bp, Homo sapiens
ttgaaacctcg

SEQ ID NO: 1954 - DNA, 11 bp, Homo sapiens
tatatcatatt

SEQ ID NO: 1955 - DNA, 11 bp, Homo sapiens
tggcacgctgc

SEQ ID NO: 1956 - DNA, 11 bp, Homo sapiens
acagagtctca

SEQ ID NO: 1957 - DNA, 11 bp, Homo sapiens
gaaatattgat

SEQ ID NO: 1958 - DNA, 11 bp, Homo sapiens
gtgaaacctga

SEQ ID NO: 1959 - DNA, 11 bp, Homo sapiens
atgtcaaccaa

SEQ ID NO: 1960 - DNA, 11 bp, Homo sapiens
gaaaagggcac

SEQ ID NO: 1961 - DNA, 11 bp, Homo sapiens
tgcagtctttg

SEQ ID NO: 1962 - DNA, 11 bp, Homo sapiens
cagatttccag

SEQ ID NO: 1963 - DNA, 11 bp, Homo sapiens
aaaaggaaacc

SEQ ID NO: 1964 - DNA, 11 bp, Homo sapiens
attgtaagctt

SEQ ID NO: 1965 - DNA, 11 bp, Homo sapiens
gtcttaaaata

SEQ ID NO: 1966 - DNA, 11 bp, Homo sapiens
tccgcagggaa

SEQ ID NO: 1967 - DNA, 11 bp, Homo sapiens
gctggagctca

SEQ ID NO: 1968 - DNA, 11 bp, Homo sapiens
tgttgtaaata

SEQ ID NO: 1969 - DNA, 11 bp, Homo sapiens
gctcctacatt

SEQ ID NO: 1970 - DNA, 11 bp, Homo sapiens
caggtgccaaa

SEQ ID NO: 1971 - DNA, 11 bp, Homo sapiens
tgctgctgccc

SEQ ID NO: 1972 - DNA, 11 bp, Homo sapiens
gcctgggctga

SEQ ID NO: 1973 - DNA, 11 bp, Homo sapiens
gtatgaggtgg

SEQ ID NO: 1974 - DNA, 11 bp, Homo sapiens
gtaaacagaaa

SEQ ID NO: 1975 - DNA, 11 bp, Homo sapiens
tgaaataaact

SEQ ID NO: 1976 - DNA, 11 bp, Homo sapiens
ttttgtcaaca

SEQ ID NO: 1977 - DNA, 11 bp, Homo sapiens
gcacgtgttct

SEQ ID NO: 1978 - DNA, 11 bp, Homo sapiens
ttagtccacag

SEQ ID NO: 1979 - DNA, 11 bp, Homo sapiens
aaatttcaagc

SEQ ID NO: 1980 - DNA, 11 bp, Homo sapiens
cccagctactt

SEQ ID NO: 1981 - DNA, 11 bp, Homo sapiens
aaaccaggaaa

SEQ ID NO: 1982 - DNA, 11 bp, Homo sapiens
aatttcaagaa

SEQ ID NO: 1983 - DNA, 11 bp, Homo sapiens
taccctaaaat

SEQ ID NO: 1984 - DNA, 11 bp, Homo sapiens
ggactgtagtg

SEQ ID NO: 1985 - DNA, 11 bp, Homo sapiens
ctcccgccgga

SEQ ID NO: 1986 - DNA, 11 bp, Homo sapiens
tgaagtgccct

SEQ ID NO: 1987 - DNA, 11 bp, Homo sapiens
gaagaggctgg

SEQ ID NO: 1988 - DNA, 11 bp, Homo sapiens
ttcccttcttc

SEQ ID NO: 1989 - DNA, 11 bp, Homo sapiens
aacccggaagg

SEQ ID NO: 1990 - DNA, 11 bp, Homo sapiens
gtggcgcgtgc

SEQ ID NO: 1991 - DNA, 11 bp, Homo sapiens
taccctaaaac

SEQ ID NO: 1992 - DNA, 11 bp, Homo sapiens
cctgtgatccc

SEQ ID NO: 1993 - DNA, 11 bp, Homo sapiens
ccggccctacc

SEQ ID NO: 1994 - DNA, 11 bp, Homo sapiens
gcacgcgtaac

SEQ ID NO: 1995 - DNA, 11 bp, Homo sapiens
aacaaggtgag

SEQ ID NO: 1996 - DNA, 11 bp, Homo sapiens
tgcgtccctcc

SEQ ID NO: 1997 - DNA, 11 bp, Homo sapiens
gacccttttgg

SEQ ID NO: 1998 - DNA, 11 bp, Homo sapiens
gatttttctga

SEQ ID NO: 1999 - DNA, 11 bp, Homo sapiens
tgattctgttt

SEQ ID NO: 2000 - DNA, 11 bp, Homo sapiens
cccggctaatt

SEQ ID NO: 2001 - DNA, 11 bp, Homo sapiens
gtgaagccctg

SEQ ID NO: 2002 - DNA, 11 bp, Homo sapiens
actgaaagaag

SEQ ID NO: 2003 - DNA, 11 bp, Homo sapiens
ctgagagctgg

SEQ ID NO: 2004 - DNA, 11 bp, Homo sapiens
gttccagcagc

SEQ ID NO: 2005 - DNA, 11 bp, Homo sapiens
ccattgcgctc

SEQ ID NO: 2006 - DNA, 11 bp, Homo sapiens
ggatgcgcagg

SEQ ID NO: 2007 - DNA, 11 bp, Homo sapiens
ttggtggaggt

SEQ ID NO: 2008 - DNA, 11 bp, Homo sapiens
agaattatggg

SEQ ID NO: 2009 - DNA, 11 bp, Homo sapiens
tgtggtggcac

SEQ ID NO: 2010 - DNA, 11 bp, Homo sapiens
cagttcttgat

SEQ ID NO: 2011 - DNA, 11 bp, Homo sapiens
gcaagaccccg

SEQ ID NO: 2012 - DNA, 11 bp, Homo sapiens
aaaacaaaaca

SEQ ID NO: 2013 - DNA, 11 bp, Homo sapiens
aagactgacaa

SEQ ID NO: 2014 - DNA, 11 bp, Homo sapiens
ttctcctcttt

SEQ ID NO: 2015 - DNA, 11 bp, Homo sapiens
tcaatcagtga

SEQ ID NO: 2016 - DNA, 11 bp, Homo sapiens
tggggtcccca

SEQ ID NO: 2017 - DNA, 11 bp, Homo sapiens
ccattgcactg

SEQ ID NO: 2018 - DNA, 11 bp, Homo sapiens
aataaattcct

SEQ ID NO: 2019 - DNA, 11 bp, Homo sapiens
gtggcagatgc

SEQ ID NO: 2020 - DNA, 11 bp, Homo sapiens
cctgttatccc

SEQ ID NO: 2021 - DNA, 11 bp, Homo sapiens
gcgaaactcca

SEQ ID NO: 2022 - DNA, 11 bp, Homo sapiens
gtgaaacctcg

SEQ ID NO: 2023 - DNA, 11 bp, Homo sapiens
ggcagacacat

SEQ ID NO: 2024 - DNA, 11 bp, Homo sapiens
aaagagaagag

SEQ ID NO: 2025 - DNA, 11 bp, Homo sapiens
acaaagcattt

SEQ ID NO: 2026 - DNA, 11 bp, Homo sapiens
tttagtgacgt

SEQ ID NO: 2027 - DNA, 11 bp, Homo sapiens
agccaccacgc

SEQ ID NO: 2028 - DNA, 11 bp, Homo sapiens
gcgaaacctcg

SEQ ID NO: 2029 - DNA, 11 bp, Homo sapiens
gcagttggatc

SEQ ID NO: 2030 - DNA, 11 bp, Homo sapiens
cttgtgaagtg

SEQ ID NO: 2031 - DNA, 11 bp, Homo sapiens
gtggctcacgc

SEQ ID NO: 2032 - DNA, 11 bp, Homo sapiens
cagctatttca

SEQ ID NO: 2033 - DNA, 11 bp, Homo sapiens
cacacacacac

SEQ ID NO: 2034 - DNA, 11 bp, Homo sapiens
ccaccacactc

SEQ ID NO: 2035 - DNA, 11 bp, Homo sapiens
caagggtgaca

SEQ ID NO: 2036 - DNA, 11 bp, Homo sapiens
gcagcacttat

SEQ ID NO: 2037 - DNA, 11 bp, Homo sapiens
cctgacctcaa

SEQ ID NO: 2038 - DNA, 11 bp, Homo sapiens
ggggtatggtt

SEQ ID NO: 2039 - DNA, 11 bp, Homo sapiens
agcagccgctc

SEQ ID NO: 2040 - DNA, 11 bp, Homo sapiens
ctcctggccca

SEQ ID NO: 2041 - DNA, 11 bp, Homo sapiens
ttatgcctcca

SEQ ID NO: 2042 - DNA, 11 bp, Homo sapiens
tacttcctgcg

SEQ ID NO: 2043 - DNA, 11 bp, Homo sapiens
ccttgcccagg

SEQ ID NO: 2044 - DNA, 11 bp, Homo sapiens
gtagggttcct

SEQ ID NO: 2045 - DNA, 11 bp, Homo sapiens
ataaccaaatg

SEQ ID NO: 2046 - DNA, 11 bp, Homo sapiens
cctgtgaatag

SEQ ID NO: 2047 - DNA, 11 bp, Homo sapiens
tgaccagggtc

SEQ ID NO: 2048 - DNA, 11 bp, Homo sapiens
cagacccaaaa

SEQ ID NO: 2049 - DNA, 11 bp, Homo sapiens
ttctcataatc

SEQ ID NO: 2050 - DNA, 11 bp, Homo sapiens
actgatgcaag

SEQ ID NO: 2051 - DNA, 11 bp, Homo sapiens
aactctgatat

SEQ ID NO: 2052 - DNA, 11 bp, Homo sapiens
gggcatctcca

SEQ ID NO: 2053 - DNA, 11 bp, Homo sapiens
tggatgtctgt

SEQ ID NO: 2054 - DNA, 11 bp, Homo sapiens
tattagaagca

SEQ ID NO: 2055 - DNA, 11 bp, Homo sapiens
cactgaatatg

SEQ ID NO: 2056 - DNA, 11 bp, Homo sapiens
agttaataaag

SEQ ID NO: 2057 - DNA, 11 bp, Homo sapiens
ttatattttct

SEQ ID NO: 2058 - DNA, 11 bp, Homo sapiens
gtcaccaaaca

SEQ ID NO: 2059 - DNA, 11 bp, Homo sapiens
ttacactgtaa

SEQ ID NO: 2060 - DNA, 11 bp, Homo sapiens
aagttgcatct

SEQ ID NO: 2061 - DNA, 11 bp, Homo sapiens
tagacatttga

SEQ ID NO: 2062 - DNA, 11 bp, Homo sapiens
ttcataggtaa

SEQ ID NO: 2063 - DNA, 11 bp, Homo sapiens
cattttaggca

SEQ ID NO: 2064 - DNA, 11 bp, Homo sapiens
atactataatt

SEQ ID NO: 2065 - DNA, 11 bp, Homo sapiens
cttcgctttgt

SEQ ID NO: 2066 - DNA, 11 bp, Homo sapiens
atgatatatgc

SEQ ID NO: 2067 - DNA, 11 bp, Homo sapiens
gcccccttaca

SEQ ID NO: 2068 - DNA, 11 bp, Homo sapiens
tcagtccctgt

SEQ ID NO: 2069 - DNA, 11 bp, Homo sapiens
aattttcatta

SEQ ID NO: 2070 - DNA, 11 bp, Homo sapiens
gccagtccact

SEQ ID NO: 2071 - DNA, 11 bp, Homo sapiens
tagagagttta

SEQ ID NO: 2072 - DNA, 11 bp, Homo sapiens
gctgtcccctc

SEQ ID NO: 2073 - DNA, 11 bp, Homo sapiens
gtgaaagccgt

SEQ ID NO: 2074 - DNA, 11 bp, Homo sapiens
tcttccagaaa

SEQ ID NO: 2075 - DNA, 11 bp, Homo sapiens
ttggccgggat

SEQ ID NO: 2076 - DNA, 11 bp, Homo sapiens
gtaaagaatgt

SEQ ID NO: 2077 - DNA, 11 bp, Homo sapiens
aaatttttgta

SEQ ID NO: 2078 - DNA, 11 bp, Homo sapiens
aacgctgcaaa

SEQ ID NO: 2079 - DNA, 11 bp, Homo sapiens
gtaccctaaaa

SEQ ID NO: 2080 - DNA, 11 bp, Homo sapiens
taatctttttt

SEQ ID NO: 2081 - DNA, 11 bp, Homo sapiens
aaattgtatgt

SEQ ID NO: 2082 - DNA, 11 bp, Homo sapiens
ccactacattc

SEQ ID NO: 2083 - DNA, 11 bp, Homo sapiens
gccgcactcag

SEQ ID NO: 2084 - DNA, 11 bp, Homo sapiens
tcttgtcatac

SEQ ID NO: 2085 - DNA, 11 bp, Homo sapiens
cagcacctgat

SEQ ID NO: 2086 - DNA, 11 bp, Homo sapiens
ttgaataaaag

SEQ ID NO: 2087 - DNA, 11 bp, Homo sapiens
gggaagtgtgc

SEQ ID NO: 2088 - DNA, 11 bp, Homo sapiens
cctggcctacc

SEQ ID NO: 2089 - DNA, 11 bp, Homo sapiens
tttattttcaa

SEQ ID NO: 2090 - DNA, 11 bp, Homo sapiens
tctctctgcct

SEQ ID NO: 2091 - DNA, 11 bp, Homo sapiens
agaggaagtaa

SEQ ID NO: 2092 - DNA, 11 bp, Homo sapiens
accaaaaaaaa

SEQ ID NO: 2093 - DNA, 11 bp, Homo sapiens
gggacatttat

SEQ ID NO: 2094 - DNA, 11 bp, Homo sapiens
taccatccata

SEQ ID NO: 2095 - DNA, 11 bp, Homo sapiens
ttgatgaagaa

SEQ ID NO: 2096 - DNA, 11 bp, Homo sapiens
gcccggtgccc

SEQ ID NO: 2097 - DNA, 11 bp, Homo sapiens
aagaactgttt

SEQ ID NO: 2098 - DNA, 11 bp, Homo sapiens
ccagcaactgt

SEQ ID NO: 2099 - DNA, 11 bp, Homo sapiens
atggtgcgtgc

SEQ ID NO: 2100 - DNA, 11 bp, Homo sapiens
ctcttcagggt

SEQ ID NO: 2101 - DNA, 11 bp, Homo sapiens
tcaatgtgaaa

SEQ ID NO: 2102 - DNA, 11 bp, Homo sapiens
cttaatactac

SEQ ID NO: 2103 - DNA, 11 bp, Homo sapiens
ggctgcagtat

SEQ ID NO: 2104 - DNA, 11 bp, Homo sapiens
ggaagctgaag

SEQ ID NO: 2105 - DNA, 11 bp, Homo sapiens
cctcgggcatc

SEQ ID NO: 2106 - DNA, 11 bp, Homo sapiens
ttttcttgctg

SEQ ID NO: 2107 - DNA, 11 bp, Homo sapiens
gccttgcctct

SEQ ID NO: 2108 - DNA, 11 bp, Homo sapiens
ctttaaaaaaa

SEQ ID NO: 2109 - DNA, 11 bp, Homo sapiens
tgcggaaaaaa

SEQ ID NO: 2110 - DNA, 11 bp, Homo sapiens
tgactttctgc

SEQ ID NO: 2111 - DNA, 11 bp, Homo sapiens
catttacatat

SEQ ID NO: 2112 - DNA, 11 bp, Homo sapiens
aatgtgttact

SEQ ID NO: 2113 - DNA, 11 bp, Homo sapiens
atctttattcc

SEQ ID NO: 2114 - DNA, 11 bp, Homo sapiens
tgtttgaattc

SEQ ID NO: 2115 - DNA, 11 bp, Homo sapiens
acaacacccca

SEQ ID NO: 2116 - DNA, 11 bp, Homo sapiens
ctggaaataaa

SEQ ID NO: 2117 - DNA, 11 bp, Homo sapiens
ttatttatgaa

SEQ ID NO: 2118 - DNA, 11 bp, Homo sapiens
taccaaggatt

SEQ ID NO: 2119 - DNA, 11 bp, Homo sapiens
gtgccaaacac

SEQ ID NO: 2120 - DNA, 11 bp, Homo sapiens
cccggcccaaa

SEQ ID NO: 2121 - DNA, 11 bp, Homo sapiens
agaattgcttg

SEQ ID NO: 2122 - DNA, 11 bp, Homo sapiens
tctctgatgct

SEQ ID NO: 2123 - DNA, 11 bp, Homo sapiens
acactgcactc

SEQ ID NO: 2124 - DNA, 11 bp, Homo sapiens
gaaatgagcag

SEQ ID NO: 2125 - DNA, 11 bp, Homo sapiens
gctggatgcgg

SEQ ID NO: 2126 - DNA, 11 bp, Homo sapiens
gcaaaacccta

SEQ ID NO: 2127 - DNA, 11 bp, Homo sapiens
tttgctctccc

SEQ ID NO: 2128 - DNA, 11 bp, Homo sapiens
ggaggctgagg

SEQ ID NO: 2129 - DNA, 11 bp, Homo sapiens
gtaaaacccca

SEQ ID NO: 2130 - DNA, 11 bp, Homo sapiens
ggagggggctt

SEQ ID NO: 2131 - DNA, 11 bp, Homo sapiens
agctaagtttg

SEQ ID NO: 2132 - DNA, 11 bp, Homo sapiens
cacacagtttt

SEQ ID NO: 2133 - DNA, 11 bp, Homo sapiens
atggcgggtgc

SEQ ID NO: 2134 - DNA, 11 bp, Homo sapiens
gacttgtatat

SEQ ID NO: 2135 - DNA, 11 bp, Homo sapiens
atagtacagcc

SEQ ID NO: 2136 - DNA, 11 bp, Homo sapiens
agccaccgctc

SEQ ID NO: 2137 - DNA, 11 bp, Homo sapiens
ggcaggatgat

SEQ ID NO: 2138 - DNA, 11 bp, Homo sapiens
gcctgggacct

SEQ ID NO: 2139 - DNA, 11 bp, Homo sapiens
acagccgtggg

SEQ ID NO: 2140 - DNA, 11 bp, Homo sapiens
agccgagatca

SEQ ID NO: 2141 - DNA, 11 bp, Homo sapiens
agcctttgttg

SEQ ID NO: 2142 - DNA, 11 bp, Homo sapiens
gtgtgcctcca

SEQ ID NO: 2143 - DNA, 11 bp, Homo sapiens
tggagaagagc

SEQ ID NO: 2144 - DNA, 11 bp, Homo sapiens
ggccccattgc

SEQ ID NO: 2145 - DNA, 11 bp, Homo sapiens
aatattcatag

SEQ ID NO: 2146 - DNA, 11 bp, Homo sapiens
gctccgtaagg

SEQ ID NO: 2147 - DNA, 11 bp, Homo sapiens
gaggtgcccca

SEQ ID NO: 2148 - DNA, 11 bp, Homo sapiens
agtgtattttt

SEQ ID NO: 2149 - DNA, 11 bp, Homo sapiens
taaacctaaag

SEQ ID NO: 2150 - DNA, 11 bp, Homo sapiens
agtcaagcccc

SEQ ID NO: 2151 - DNA, 11 bp, Homo sapiens
tatcaaaacat

SEQ ID NO: 2152 - DNA, 11 bp, Homo sapiens
atcctactgtt

SEQ ID NO: 2153 - DNA, 11 bp, Homo sapiens
gcaccaaatga

SEQ ID NO: 2154 - DNA, 11 bp, Homo sapiens
ccaatgctatg

SEQ ID NO: 2155 - DNA, 11 bp, Homo sapiens
catcgttacat

SEQ ID NO: 2156 - DNA, 11 bp, Homo sapiens
taaccaaaaac

SEQ ID NO: 2157 - DNA, 11 bp, Homo sapiens
ctgaaacccca

SEQ ID NO: 2158 - DNA, 11 bp, Homo sapiens
ggaaggcaagc

SEQ ID NO: 2159 - DNA, 11 bp, Homo sapiens
gaaaggtggtt

SEQ ID NO: 2160 - DNA, 11 bp, Homo sapiens
tcataaccttg

SEQ ID NO: 2161 - DNA, 11 bp, Homo sapiens
taccccataaa

SEQ ID NO: 2162 - DNA, 11 bp, Homo sapiens
cgccccctgcg

SEQ ID NO: 2163 - DNA, 11 bp, Homo sapiens
acaaagcccca

SEQ ID NO: 2164 - DNA, 11 bp, Homo sapiens
cctatagtcct

SEQ ID NO: 2165 - DNA, 11 bp, Homo sapiens
ccagtacagcc

SEQ ID NO: 2166 - DNA, 11 bp, Homo sapiens
ctgctgctggt

SEQ ID NO: 2167 - DNA, 11 bp, Homo sapiens
cttaatcttgt

SEQ ID NO: 2168 - DNA, 11 bp, Homo sapiens
gccacaccccc

SEQ ID NO: 2169 - DNA, 11 bp, Homo sapiens
tcctccctact

SEQ ID NO: 2170 - DNA, 11 bp, Homo sapiens
gtgagacccca

SEQ ID NO: 2171 - DNA, 11 bp, Homo sapiens
cagatgcaaaa

SEQ ID NO: 2172 - DNA, 11 bp, Homo sapiens
ccccaggagaa

SEQ ID NO: 2173 - DNA, 11 bp, Homo sapiens
cttctggggac

SEQ ID NO: 2174 - DNA, 11 bp, Homo sapiens
gtggcttacac

SEQ ID NO: 2175 - DNA, 11 bp, Homo sapiens
gcgagacccca

SEQ ID NO: 2176 - DNA, 11 bp, Homo sapiens
taaactattgg

SEQ ID NO: 2177 - DNA, 11 bp, Homo sapiens
gacggctgcaa

SEQ ID NO: 2178 - DNA, 11 bp, Homo sapiens
gtgaaaccgtc

SEQ ID NO: 2179 - DNA, 11 bp, Homo sapiens
ccactggactc

SEQ ID NO: 2180 - DNA, 11 bp, Homo sapiens
tgttagcaaat

SEQ ID NO: 2181 - DNA, 11 bp, Homo sapiens
aagtacgagga

SEQ ID NO: 2182 - DNA, 11 bp, Homo sapiens
ctgttggaaaa

SEQ ID NO: 2183 - DNA, 11 bp, Homo sapiens
aaccactgtgc

SEQ ID NO: 2184 - DNA, 11 bp, Homo sapiens
cttctccaaaa

SEQ ID NO: 2185 - DNA, 11 bp, Homo sapiens
gtggtcaagtt

SEQ ID NO: 2186 - DNA, 11 bp, Homo sapiens
cctttgctgag

SEQ ID NO: 2187 - DNA, 11 bp, Homo sapiens
ttgctgccagc

SEQ ID NO: 2188 - DNA, 11 bp, Homo sapiens
tgaatttcctg

SEQ ID NO: 2189 - DNA, 11 bp, Homo sapiens
gtggtatatgc

SEQ ID NO: 2190 - DNA, 11 bp, Homo sapiens
gtggtgcactc

SEQ ID NO: 2191 - DNA, 11 bp, Homo sapiens
gtggcacaagc

SEQ ID NO: 2192 - DNA, 11 bp, Homo sapiens
agccaccatac

SEQ ID NO: 2193 - DNA, 11 bp, Homo sapiens
taaaaccgttt

SEQ ID NO: 2194 - DNA, 11 bp, Homo sapiens
ccttgtttaac

SEQ ID NO: 2195 - DNA, 11 bp, Homo sapiens
gctcactgcaa

SEQ ID NO: 2196 - DNA, 11 bp, Homo sapiens
tgccttgggct

SEQ ID NO: 2197 - DNA, 11 bp, Homo sapiens
ttattgttccc

SEQ ID NO: 2198 - DNA, 11 bp, Homo sapiens
gggacaaccca

SEQ ID NO: 2199 - DNA, 11 bp, Homo sapiens
gtttcttactg

SEQ ID NO: 2200 - DNA, 11 bp, Homo sapiens
ttttgcttttt

SEQ ID NO: 2201 - DNA, 11 bp, Homo sapiens
attttcatcaa

SEQ ID NO: 2202 - DNA, 11 bp, Homo sapiens
tacagaatgtg

SEQ ID NO: 2203 - DNA, 11 bp, Homo sapiens
ttgtattgttg

SEQ ID NO: 2204 - DNA, 11 bp, Homo sapiens
gggcagaaggc

SEQ ID NO: 2205 - DNA, 11 bp, Homo sapiens
tattggcctgg

SEQ ID NO: 2206 - DNA, 11 bp, Homo sapiens
tgactgtaaaa

SEQ ID NO: 2207 - DNA, 11 bp, Homo sapiens
acctgcttccc

SEQ ID NO: 2208 - DNA, 11 bp, Homo sapiens
tgatacagaaa

SEQ ID NO: 2209 - DNA, 11 bp, Homo sapiens
aatgaattctt

SEQ ID NO: 2210 - DNA, 11 bp, Homo sapiens
attttgtcact

SEQ ID NO: 2211 - DNA, 11 bp, Homo sapiens
caccctttact

SEQ ID NO: 2212 - DNA, 11 bp, Homo sapiens
ctggtgggcca

SEQ ID NO: 2213 - DNA, 11 bp, Homo sapiens
ctttgaaatag

SEQ ID NO: 2214 - DNA, 11 bp, Homo sapiens
agtcctgcttc

SEQ ID NO: 2215 - DNA, 11 bp, Homo sapiens
taacattgaga

SEQ ID NO: 2216 - DNA, 11 bp, Homo sapiens
ctgagaagcgg

SEQ ID NO: 2217 - DNA, 11 bp, Homo sapiens
tatatatagag

SEQ ID NO: 2218 - DNA, 11 bp, Homo sapiens
gtctgctccag

SEQ ID NO: 2219 - DNA, 11 bp, Homo sapiens
cccccgaggct

SEQ ID NO: 2220 - DNA, 11 bp, Homo sapiens
aatgaaaaatt

SEQ ID NO: 2221 - DNA, 11 bp, Homo sapiens
tttgtactaat

SEQ ID NO: 2222 - DNA, 11 bp, Homo sapiens
ttccattatca

SEQ ID NO: 2223 - DNA, 11 bp, Homo sapiens
gtttaaaaagc

SEQ ID NO: 2224 - DNA, 11 bp, Homo sapiens
caatttaaagt

SEQ ID NO: 2225 - DNA, 11 bp, Homo sapiens
tgtatttgtaa

SEQ ID NO: 2226 - DNA, 11 bp, Homo sapiens
gtggcgtgcct

SEQ ID NO: 2227 - DNA, 11 bp, Homo sapiens
taaaatgtgac

SEQ ID NO: 2228 - DNA, 11 bp, Homo sapiens
aacaataaaaa

SEQ ID NO: 2229 - DNA, 11 bp, Homo sapiens
gaaacacgtag

SEQ ID NO: 2230 - DNA, 11 bp, Homo sapiens
actttaacagg

SEQ ID NO: 2231 - DNA, 11 bp, Homo sapiens
agccccacaaa

SEQ ID NO: 2232 - DNA, 11 bp, Homo sapiens
tggtgagatga

SEQ ID NO: 2233 - DNA, 11 bp, Homo sapiens
ggcaccgcgtg

SEQ ID NO: 2234 - DNA, 11 bp, Homo sapiens
caaggataaga

SEQ ID NO: 2235 - DNA, 11 bp, Homo sapiens
cgccccggcgg

SEQ ID NO: 2236 - DNA, 11 bp, Homo sapiens
gaagagaaggt

SEQ ID NO: 2237 - DNA, 11 bp, Homo sapiens
cagattttgtg

SEQ ID NO: 2238 - DNA, 11 bp, Homo sapiens
attagttacaa

SEQ ID NO: 2239 - DNA, 11 bp, Homo sapiens
cccaccacatt

SEQ ID NO: 2240 - DNA, 11 bp, Homo sapiens
ctgctaaccca

SEQ ID NO: 2241 - DNA, 11 bp, Homo sapiens
gttctctgctt

SEQ ID NO: 2242 - DNA, 11 bp, Homo sapiens
tatgtacagtt

SEQ ID NO: 2243 - DNA, 11 bp, Homo sapiens
aacccgggagt

SEQ ID NO: 2244 - DNA, 11 bp, Homo sapiens
gtaacctcaaa

SEQ ID NO: 2245 - DNA, 11 bp, Homo sapiens
ttcaatttctt

SEQ ID NO: 2246 - DNA, 11 bp, Homo sapiens
agctaaaaaaa

SEQ ID NO: 2247 - DNA, 11 bp, Homo sapiens
ttatttaaaag

SEQ ID NO: 2248 - DNA, 11 bp, Homo sapiens
gactccacatt

SEQ ID NO: 2249 - DNA, 11 bp, Homo sapiens
agacaaaatta

SEQ ID NO: 2250 - DNA, 11 bp, Homo sapiens
actgagaagag

SEQ ID NO: 2251 - DNA, 11 bp, Homo sapiens
ggtgctgaata

SEQ ID NO: 2252 - DNA, 11 bp, Homo sapiens
gatttctttga

SEQ ID NO: 2253 - DNA, 11 bp, Homo sapiens
tgtcaaaagag

SEQ ID NO: 2254 - DNA, 11 bp, Homo sapiens
acggggagagt

SEQ ID NO: 2255 - DNA, 11 bp, Homo sapiens
tggctttatcc

SEQ ID NO: 2256 - DNA, 11 bp, Homo sapiens
gttgcgtgtcc

SEQ ID NO: 2257 - DNA, 11 bp, Homo sapiens
taaacggcctc

SEQ ID NO: 2258 - DNA, 11 bp, Homo sapiens
ggccagaatga

SEQ ID NO: 2259 - DNA, 11 bp, Homo sapiens
tgaagcaaaaa

SEQ ID NO: 2260 - DNA, 11 bp, Homo sapiens
tcacagctgtg

SEQ ID NO: 2261 - DNA, 11 bp, Homo sapiens
agaaaaaaaaa

SEQ ID NO: 2262 - DNA, 11 bp, Homo sapiens
gtggcgcacgc

SEQ ID NO: 2263 - DNA, 11 bp, Homo sapiens
tctgtacacct

SEQ ID NO: 2264 - DNA, 11 bp, Homo sapiens
agggaggggcc

SEQ ID NO: 2265 - DNA, 11 bp, Homo sapiens
aggacaccgcc

SEQ ID NO: 2266 - DNA, 11 bp, Homo sapiens
cgagggcactc

SEQ ID NO: 2267 - DNA, 11 bp, Homo sapiens
tgctgccagac

SEQ ID NO: 2268 - DNA, 11 bp, Homo sapiens
tactggtttat

SEQ ID NO: 2269 - DNA, 11 bp, Homo sapiens
cccccacctaa

SEQ ID NO: 2270 - DNA, 11 bp, Homo sapiens
tgaatgatacg

SEQ ID NO: 2271 - DNA, 11 bp, Homo sapiens
tgaaactgcaa

SEQ ID NO: 2272 - DNA, 11 bp, Homo sapiens
tgagtctggct

SEQ ID NO: 2273 - DNA, 11 bp, Homo sapiens
ggagtgtgctc

SEQ ID NO: 2274 - DNA, 11 bp, Homo sapiens
tcatcgggctg

SEQ ID NO: 2275 - DNA, 11 bp, Homo sapiens
gagaccttgga

SEQ ID NO: 2276 - DNA, 11 bp, Homo sapiens
cactggacgag

SEQ ID NO: 2277 - DNA, 11 bp, Homo sapiens
tgtacttatta

SEQ ID NO: 2278 - DNA, 11 bp, Homo sapiens
accaccctgtt

SEQ ID NO: 2279 - DNA, 11 bp, Homo sapiens
atttctcattc

SEQ ID NO: 2280 - DNA, 11 bp, Homo sapiens
ggacatttttc

SEQ ID NO: 2281 - DNA, 11 bp, Homo sapiens
catcttaaatg

SEQ ID NO: 2282 - DNA, 11 bp, Homo sapiens
gaatcatttat

SEQ ID NO: 2283 - DNA, 11 bp, Homo sapiens
atcaaatgcaa

SEQ ID NO: 2284 - DNA, 11 bp, Homo sapiens
agcaccagaac

SEQ ID NO: 2285 - DNA, 11 bp, Homo sapiens
tcctgaccacc

SEQ ID NO: 2286 - DNA, 11 bp, Homo sapiens
cttataatccc

SEQ ID NO: 2287 - DNA, 11 bp, Homo sapiens
acccatcgcct

SEQ ID NO: 2288 - DNA, 11 bp, Homo sapiens
ccattgcacta

SEQ ID NO: 2289 - DNA, 11 bp, Homo sapiens
taccccagaac

SEQ ID NO: 2290 - DNA, 11 bp, Homo sapiens
ctctcaccctg

SEQ ID NO: 2291 - DNA, 11 bp, Homo sapiens
caagggcttgc

SEQ ID NO: 2292 - DNA, 11 bp, Homo sapiens
tttgcacttgt

SEQ ID NO: 2293 - DNA, 11 bp, Homo sapiens
gccaggagcta

SEQ ID NO: 2294 - DNA, 11 bp, Homo sapiens
taaaatactcc

SEQ ID NO: 2295 - DNA, 11 bp, Homo sapiens
tgattgatttg

SEQ ID NO: 2296 - DNA, 11 bp, Homo sapiens
taaaaactttc

SEQ ID NO: 2297 - DNA, 11 bp, Homo sapiens
tcactgcactc

SEQ ID NO: 2298 - DNA, 11 bp, Homo sapiens
accaaagcccc

SEQ ID NO: 2299 - DNA, 11 bp, Homo sapiens
aatagggtcaa

SEQ ID NO: 2300 - DNA, 11 bp, Homo sapiens
cctatagtccc

SEQ ID NO: 2301 - DNA, 11 bp, Homo sapiens
cctccctgctc

SEQ ID NO: 2302 - DNA, 11 bp, Homo sapiens
acctagccact

SEQ ID NO: 2303 - DNA, 11 bp, Homo sapiens
cagctcagctg

SEQ ID NO: 2304 - DNA, 11 bp, Homo sapiens
tcaataaatgt

SEQ ID NO: 2305 - DNA, 11 bp, Homo sapiens
cactcacaccc

SEQ ID NO: 2306 - DNA, 11 bp, Homo sapiens
gtgaaacctgt

SEQ ID NO: 2307 - DNA, 11 bp, Homo sapiens
atcataccacg

SEQ ID NO: 2308 - DNA, 11 bp, Homo sapiens
aacggggccct

SEQ ID NO: 2309 - DNA, 11 bp, Homo sapiens
tccccggtcag

SEQ ID NO: 2310 - DNA, 11 bp, Homo sapiens
gcgcatcaaaa

SEQ ID NO: 2311 - DNA, 11 bp, Homo sapiens
aatttcaggca

SEQ ID NO: 2312 - DNA, 11 bp, Homo sapiens
atcccactact

SEQ ID NO: 2313 - DNA, 11 bp, Homo sapiens
atccgctgggg

SEQ ID NO: 2314 - DNA, 11 bp, Homo sapiens
actgtggactg

SEQ ID NO: 2315 - DNA, 11 bp, Homo sapiens
agagaagaatg

SEQ ID NO: 2316 - DNA, 11 bp, Homo sapiens
aggattgtttg

SEQ ID NO: 2317 - DNA, 11 bp, Homo sapiens
gtaaagatttg

SEQ ID NO: 2318 - DNA, 11 bp, Homo sapiens
actatggatag

SEQ ID NO: 2319 - DNA, 11 bp, Homo sapiens
gttaggcacga

SEQ ID NO: 2320 - DNA, 11 bp, Homo sapiens
tgccaccaaca

SEQ ID NO: 2321 - DNA, 11 bp, Homo sapiens
aaatgggaaca

SEQ ID NO: 2322 - DNA, 11 bp, Homo sapiens
ggggtttgttt

SEQ ID NO: 2323 - DNA, 11 bp, Homo sapiens
acatagtctga

SEQ ID NO: 2324 - DNA, 11 bp, Homo sapiens
tatgctgaaat

SEQ ID NO: 2325 - DNA, 11 bp, Homo sapiens
ttcactccatt

SEQ ID NO: 2326 - DNA, 11 bp, Homo sapiens
tcttggcaaca

SEQ ID NO: 2327 - DNA, 11 bp, Homo sapiens
caataaaattc

SEQ ID NO: 2328 - DNA, 11 bp, Homo sapiens
ggcttttggtt

SEQ ID NO: 2329 - DNA, 11 bp, Homo sapiens
agtttgtttta

SEQ ID NO: 2330 - DNA, 11 bp, Homo sapiens
ttccactgtga

SEQ ID NO: 2331 - DNA, 11 bp, Homo sapiens
caagtgggtgt

SEQ ID NO: 2332 - DNA, 11 bp, Homo sapiens
tgcagggacct

SEQ ID NO: 2333 - DNA, 11 bp, Homo sapiens
tacttcaccca

SEQ ID NO: 2334 - DNA, 11 bp, Homo sapiens
ctttgatttat

SEQ ID NO: 2335 - DNA, 11 bp, Homo sapiens
tgttgtttttt

SEQ ID NO: 2336 - DNA, 11 bp, Homo sapiens
gtagcgcctcc

SEQ ID NO: 2337 - DNA, 11 bp, Homo sapiens
ctagtggcggc

SEQ ID NO: 2338 - DNA, 11 bp, Homo sapiens
acctcacctgg

SEQ ID NO: 2339 - DNA, 11 bp, Homo sapiens
cttgttcaaaa

SEQ ID NO: 2340 - DNA, 11 bp, Homo sapiens
cctctttccag

SEQ ID NO: 2341 - DNA, 11 bp, Homo sapiens
tcttagttcta

SEQ ID NO: 2342 - DNA, 11 bp, Homo sapiens
caccttatagt

SEQ ID NO: 2343 - DNA, 11 bp, Homo sapiens
agcttctacca

SEQ ID NO: 2344 - DNA, 11 bp, Homo sapiens
gtcaagcccaa

SEQ ID NO: 2345 - DNA, 11 bp, Homo sapiens
aacttatcatt

SEQ ID NO: 2346 - DNA, 11 bp, Homo sapiens
atgtgcttccg

SEQ ID NO: 2347 - DNA, 11 bp, Homo sapiens
cctttttgtcc

SEQ ID NO: 2348 - DNA, 11 bp, Homo sapiens
ctctgtttaca

SEQ ID NO: 2349 - DNA, 11 bp, Homo sapiens
gaagtgctgct

SEQ ID NO: 2350 - DNA, 11 bp, Homo sapiens
ccattgcagtc

SEQ ID NO: 2351 - DNA, 11 bp, Homo sapiens
ccactgcacgc

SEQ ID NO: 2352 - DNA, 11 bp, Homo sapiens
gtggtgtacac

SEQ ID NO: 2353 - DNA, 11 bp, Homo sapiens
ataaataaatt

SEQ ID NO: 2354 - DNA, 11 bp, Homo sapiens
ttgataaataa

SEQ ID NO: 2355 - DNA, 11 bp, Homo sapiens
gcaaaagcccg

SEQ ID NO: 2356 - DNA, 11 bp, Homo sapiens
taaaatatggg

SEQ ID NO: 2357 - DNA, 11 bp, Homo sapiens
ctttggtttgc

SEQ ID NO: 2358 - DNA, 11 bp, Homo sapiens
ccaaaggagaa

SEQ ID NO: 2359 - DNA, 11 bp, Homo sapiens
tgtaccttttc

SEQ ID NO: 2360 - DNA, 11 bp, Homo sapiens
tgttaagtgtt

SEQ ID NO: 2361 - DNA, 11 bp, Homo sapiens
tacaagctgag

SEQ ID NO: 2362 - DNA, 11 bp, Homo sapiens
tctgcgggtgg

SEQ ID NO: 2363 - DNA, 11 bp, Homo sapiens
tatcaatattc

SEQ ID NO: 2364 - DNA, 11 bp, Homo sapiens
atgttttgtaa

SEQ ID NO: 2365 - DNA, 11 bp, Homo sapiens
gctttttgttg

SEQ ID NO: 2366 - DNA, 11 bp, Homo sapiens
ctggagaccca

SEQ ID NO: 2367 - DNA, 11 bp, Homo sapiens
ttcagaataaa

SEQ ID NO: 2368 - DNA, 11 bp, Homo sapiens
acaatgaagca

SEQ ID NO: 2369 - DNA, 11 bp, Homo sapiens
gcctgtggggt

SEQ ID NO: 2370 - DNA, 11 bp, Homo sapiens
cagcaaggctt

SEQ ID NO: 2371 - DNA, 11 bp, Homo sapiens
caaggcaccaa

SEQ ID NO: 2372 - DNA, 11 bp, Homo sapiens
taccagagtcc

SEQ ID NO: 2373 - DNA, 11 bp, Homo sapiens
atttttgtaaa

SEQ ID NO: 2374 - DNA, 11 bp, Homo sapiens
tctgttacacc

SEQ ID NO: 2375 - DNA, 11 bp, Homo sapiens
acgtttgattt

SEQ ID NO: 2376 - DNA, 11 bp, Homo sapiens
aagagatgttc

SEQ ID NO: 2377 - DNA, 11 bp, Homo sapiens
ttggtcagggt

SEQ ID NO: 2378 - DNA, 11 bp, Homo sapiens
tggagctatga

SEQ ID NO: 2379 - DNA, 11 bp, Homo sapiens
agactcaggcc

SEQ ID NO: 2380 - DNA, 11 bp, Homo sapiens
gttcatccttg

SEQ ID NO: 2381 - DNA, 11 bp, Homo sapiens
tatcttgttgc

SEQ ID NO: 2382 - DNA, 11 bp, Homo sapiens
gtttgtttcct

SEQ ID NO: 2383 - DNA, 11 bp, Homo sapiens
aagacactgtt

SEQ ID NO: 2384 - DNA, 11 bp, Homo sapiens
cctagaatctg

SEQ ID NO: 2385 - DNA, 11 bp, Homo sapiens
gtcgggggaga

SEQ ID NO: 2386 - DNA, 11 bp, Homo sapiens
atgttgtcaat

SEQ ID NO: 2387 - DNA, 11 bp, Homo sapiens
ttttccctcag

SEQ ID NO: 2388 - DNA, 11 bp, Homo sapiens
acatttcatta

SEQ ID NO: 2389 - DNA, 11 bp, Homo sapiens
ttagccagggt

SEQ ID NO: 2390 - DNA, 11 bp, Homo sapiens
ggtggaaaaaa

SEQ ID NO: 2391 - DNA, 11 bp, Homo sapiens
gggcagaataa

SEQ ID NO: 2392 - DNA, 11 bp, Homo sapiens
ggtgcccggca

SEQ ID NO: 2393 - DNA, 11 bp, Homo sapiens
tagctgaggca

SEQ ID NO: 2394 - DNA, 11 bp, Homo sapiens
cggattcaatt

SEQ ID NO: 2395 - DNA, 11 bp, Homo sapiens
aagaaagggaa

SEQ ID NO: 2396 - DNA, 11 bp, Homo sapiens
tcaaaagggca

SEQ ID NO: 2397 - DNA, 11 bp, Homo sapiens
ctctccttgcc

SEQ ID NO: 2398 - DNA, 11 bp, Homo sapiens
ttgcagagggg

SEQ ID NO: 2399 - DNA, 11 bp, Homo sapiens
tgtctgcagaa

SEQ ID NO: 2400 - DNA, 11 bp, Homo sapiens
agcttccgctt

SEQ ID NO: 2401 - DNA, 11 bp, Homo sapiens
ctcacacacac

SEQ ID NO: 2402 - DNA, 11 bp, Homo sapiens
gcctacccgag

SEQ ID NO: 2403 - DNA, 11 bp, Homo sapiens
gcccacagtag

SEQ ID NO: 2404 - DNA, 11 bp, Homo sapiens
actgcagagcg

SEQ ID NO: 2405 - DNA, 11 bp, Homo sapiens
ggcccctcacc

SEQ ID NO: 2406 - DNA, 11 bp, Homo sapiens
aacagatattg

SEQ ID NO: 2407 - DNA, 11 bp, Homo sapiens
gtggcagacgc

SEQ ID NO: 2408 - DNA, 11 bp, Homo sapiens
gaaaataaagt

SEQ ID NO: 2409 - DNA, 11 bp, Homo sapiens
ttagtgtcgta

SEQ ID NO: 2410 - DNA, 11 bp, Homo sapiens
cttccttgcct

SEQ ID NO: 2411 - DNA, 11 bp, Homo sapiens
ttcatagctgc

SEQ ID NO: 2412 - DNA, 11 bp, Homo sapiens
ccctaggttgg

SEQ ID NO: 2413 - DNA, 11 bp, Homo sapiens
aagatatcagt

SEQ ID NO: 2414 - DNA, 11 bp, Homo sapiens
tttgttgaatg

SEQ ID NO: 2415 - DNA, 11 bp, Homo sapiens
caacgtcctga

SEQ ID NO: 2416 - DNA, 11 bp, Homo sapiens
gaattgacgcc

SEQ ID NO: 2417 - DNA, 11 bp, Homo sapiens
aacccattgtg

SEQ ID NO: 2418 - DNA, 11 bp, Homo sapiens
accacttcctc

SEQ ID NO: 2419 - DNA, 11 bp, Homo sapiens
gcccatcgtac

SEQ ID NO: 2420 - DNA, 11 bp, Homo sapiens
cctactcccag

SEQ ID NO: 2421 - DNA, 11 bp, Homo sapiens
gcctggtgacc

SEQ ID NO: 2422 - DNA, 11 bp, Homo sapiens
atggcaacaga

SEQ ID NO: 2423 - DNA, 11 bp, Homo sapiens
caggcctggcc

SEQ ID NO: 2424 - DNA, 11 bp, Homo sapiens
gtgagaccccg

SEQ ID NO: 2425 - DNA, 11 bp, Homo sapiens
gagctggtgaa

SEQ ID NO: 2426 - DNA, 11 bp, Homo sapiens
tctgttgagtg

SEQ ID NO: 2427 - DNA, 11 bp, Homo sapiens
ctcaacccccc

SEQ ID NO: 2428 - DNA, 11 bp, Homo sapiens
atcactaaaga

SEQ ID NO: 2429 - DNA, 11 bp, Homo sapiens
cccctgcactc

SEQ ID NO: 2430 - DNA, 11 bp, Homo sapiens
ccctctgtcag

SEQ ID NO: 2431 - DNA, 11 bp, Homo sapiens
cactgcctttg

SEQ ID NO: 2432 - DNA, 11 bp, Homo sapiens
aagatcaagat

SEQ ID NO: 2433 - DNA, 11 bp, Homo sapiens
gcgagaccctg

SEQ ID NO: 2434 - DNA, 11 bp, Homo sapiens
tttgcctggat

SEQ ID NO: 2435 - DNA, 11 bp, Homo sapiens
gtcccaacaca

SEQ ID NO: 2436 - DNA, 11 bp, Homo sapiens
ttggggtgcct

SEQ ID NO: 2437 - DNA, 11 bp, Homo sapiens
aaaaggcactt

SEQ ID NO: 2438 - DNA, 11 bp, Homo sapiens
tcttacgcgtt

SEQ ID NO: 2439 - DNA, 11 bp, Homo sapiens
atgcagttcaa

SEQ ID NO: 2440 - DNA, 11 bp, Homo sapiens
atgctgagagg

SEQ ID NO: 2441 - DNA, 11 bp, Homo sapiens
catcacactcc

SEQ ID NO: 2442 - DNA, 11 bp, Homo sapiens
tgctgttgctg

SEQ ID NO: 2443 - DNA, 11 bp, Homo sapiens
attgtttcttg

SEQ ID NO: 2444 - DNA, 11 bp, Homo sapiens
agggagacctg

SEQ ID NO: 2445 - DNA, 11 bp, Homo sapiens
ctacaaaaaga

SEQ ID NO: 2446 - DNA, 11 bp, Homo sapiens
tgtgttaagag

SEQ ID NO: 2447 - DNA, 11 bp, Homo sapiens
ccactatactc

SEQ ID NO: 2448 - DNA, 11 bp, Homo sapiens
gaatgtccttt

SEQ ID NO: 2449 - DNA, 11 bp, Homo sapiens
gaacgacctag

SEQ ID NO: 2450 - DNA, 11 bp, Homo sapiens
aagaaggcaag

SEQ ID NO: 2451 - DNA, 11 bp, Homo sapiens
atctattgaaa

SEQ ID NO: 2452 - DNA, 11 bp, Homo sapiens
tcctatgcaga

SEQ ID NO: 2453 - DNA, 11 bp, Homo sapiens
gagaccctgga

SEQ ID NO: 2454 - DNA, 11 bp, Homo sapiens
tagctcgatcc

SEQ ID NO: 2455 - DNA, 11 bp, Homo sapiens
ttgtccaggct

SEQ ID NO: 2456 - DNA, 11 bp, Homo sapiens
accctttaaca

SEQ ID NO: 2457 - DNA, 11 bp, Homo sapiens
tttttgtatta

SEQ ID NO: 2458 - DNA, 11 bp, Homo sapiens
ggagatgagga

SEQ ID NO: 2459 - DNA, 11 bp, Homo sapiens
agcctgggagg

SEQ ID NO: 2460 - DNA, 11 bp, Homo sapiens
tccctgggggt

SEQ ID NO: 2461 - DNA, 11 bp, Homo sapiens
atcaaaggttt

SEQ ID NO: 2462 - DNA, 11 bp, Homo sapiens
taactttataa

SEQ ID NO: 2463 - DNA, 11 bp, Homo sapiens
ttgtcctgacc

SEQ ID NO: 2464 - DNA, 11 bp, Homo sapiens
aactatgccag

SEQ ID NO: 2465 - DNA, 11 bp, Homo sapiens
ctgctgtaata

SEQ ID NO: 2466 - DNA, 11 bp, Homo sapiens
gggtcctctcc

SEQ ID NO: 2467 - DNA, 11 bp, Homo sapiens
agggcagtgcc

SEQ ID NO: 2468 - DNA, 11 bp, Homo sapiens
tcaccgtggac

SEQ ID NO: 2469 - DNA, 11 bp, Homo sapiens
aacccggtagg

SEQ ID NO: 2470 - DNA, 11 bp, Homo sapiens
acactgattaa

SEQ ID NO: 2471 - DNA, 11 bp, Homo sapiens
gggttggggtc

SEQ ID NO: 2472 - DNA, 11 bp, Homo sapiens
gcattgtggtg

SEQ ID NO: 2473 - DNA, 11 bp, Homo sapiens
gattatgtaat

SEQ ID NO: 2474 - DNA, 11 bp, Homo sapiens
tatgagcagaa

SEQ ID NO: 2475 - DNA, 11 bp, Homo sapiens
taaaggcacag

SEQ ID NO: 2476 - DNA, 11 bp, Homo sapiens
agcaaaactgg

SEQ ID NO: 2477 - DNA, 11 bp, Homo sapiens
tggaactgagt

SEQ ID NO: 2478 - DNA, 11 bp, Homo sapiens
ctgattcaact

SEQ ID NO: 2479 - DNA, 11 bp, Homo sapiens
ggtgagctact

SEQ ID NO: 2480 - DNA, 11 bp, Homo sapiens
cccaaaaaaaa

SEQ ID NO: 2481 - DNA, 11 bp, Homo sapiens
ggttattgtat

SEQ ID NO: 2482 - DNA, 11 bp, Homo sapiens
gagaactgtag

SEQ ID NO: 2483 - DNA, 11 bp, Homo sapiens
tctgaaaaaaa

SEQ ID NO: 2484 - DNA, 11 bp, Homo sapiens
gggacggggtg

SEQ ID NO: 2485 - DNA, 11 bp, Homo sapiens
tgtaggggtta

SEQ ID NO: 2486 - DNA, 11 bp, Homo sapiens
aagctggaggc

SEQ ID NO: 2487 - DNA, 11 bp, Homo sapiens
tacaaagcata

SEQ ID NO: 2488 - DNA, 11 bp, Homo sapiens
aattaaaaaaa

SEQ ID NO: 2489 - DNA, 11 bp, Homo sapiens
gaacaccgtcc

SEQ ID NO: 2490 - DNA, 11 bp, Homo sapiens
gcaaaactgtc

SEQ ID NO: 2491 - DNA, 11 bp, Homo sapiens
gccgccctacg

SEQ ID NO: 2492 - DNA, 11 bp, Homo sapiens
gggccttggag

SEQ ID NO: 2493 - DNA, 11 bp, Homo sapiens
ggaagaccaga

SEQ ID NO: 2494 - DNA, 11 bp, Homo sapiens
gtggctgacgc

SEQ ID NO: 2495 - DNA, 11 bp, Homo sapiens
tcaagtttaaa

SEQ ID NO: 2496 - DNA, 11 bp, Homo sapiens
aaactatcaca

SEQ ID NO: 2497 - DNA, 11 bp, Homo sapiens
gggtagtgtca

SEQ ID NO: 2498 - DNA, 11 bp, Homo sapiens
ttttattatcc

SEQ ID NO: 2499 - DNA, 11 bp, Homo sapiens
gcctttcctca

SEQ ID NO: 2500 - DNA, 11 bp, Homo sapiens
catttactcta

SEQ ID NO: 2501 - DNA, 11 bp, Homo sapiens
ctgccatcttt

SEQ ID NO: 2502 - DNA, 11 bp, Homo sapiens
tcttctttgta

SEQ ID NO: 2503 - DNA, 11 bp, Homo sapiens
ggcaaatgaag

SEQ ID NO: 2504 - DNA, 11 bp, Homo sapiens
gtggtttgttg

SEQ ID NO: 2505 - DNA, 11 bp, Homo sapiens
ttagggcccag

SEQ ID NO: 2506 - DNA, 11 bp, Homo sapiens
gcccttctcag

SEQ ID NO: 2507 - DNA, 11 bp, Homo sapiens
cttgctgaaga

SEQ ID NO: 2508 - DNA, 11 bp, Homo sapiens
aagtaagtcta

SEQ ID NO: 2509 - DNA, 11 bp, Homo sapiens
gcaccaggagc

SEQ ID NO: 2510 - DNA, 11 bp, Homo sapiens
ttacccagtgt

SEQ ID NO: 2511 - DNA, 11 bp, Homo sapiens
tttgaatcagt

SEQ ID NO: 2512 - DNA, 11 bp, Homo sapiens
ttttgtgttgg

SEQ ID NO: 2513 - DNA, 11 bp, Homo sapiens
caaacctttaa

SEQ ID NO: 2514 - DNA, 11 bp, Homo sapiens
ctaaaaaaaaa

SEQ ID NO: 2515 - DNA, 11 bp, Homo sapiens
ccagtaatccc

SEQ ID NO: 2516 - DNA, 11 bp, Homo sapiens
cccataatccc

SEQ ID NO: 2517 - DNA, 11 bp, Homo sapiens
atggcaccact

SEQ ID NO: 2518 - DNA, 11 bp, Homo sapiens
cagctggccat

SEQ ID NO: 2519 - DNA, 11 bp, Homo sapiens
ctgctgcactc

SEQ ID NO: 2520 - DNA, 11 bp, Homo sapiens
aatggcattga

SEQ ID NO: 2521 - DNA, 11 bp, Homo sapiens
ctcccctgccc

SEQ ID NO: 2522 - DNA, 11 bp, Homo sapiens
atgtccaattt

SEQ ID NO: 2523 - DNA, 11 bp, Homo sapiens
ctacaattttc

SEQ ID NO: 2524 - DNA, 11 bp, Homo sapiens
ctgtaaaacaa

SEQ ID NO: 2525 - DNA, 11 bp, Homo sapiens
tgagggatgga

SEQ ID NO: 2526 - DNA, 11 bp, Homo sapiens
aggcagaggtt

SEQ ID NO: 2527 - DNA, 11 bp, Homo sapiens
gaaaatatcaa

SEQ ID NO: 2528 - DNA, 11 bp, Homo sapiens
atgaaaccctg

SEQ ID NO: 2529 - DNA, 11 bp, Homo sapiens
gtcttcgaagt

SEQ ID NO: 2530 - DNA, 11 bp, Homo sapiens
ctgaaggctga

SEQ ID NO: 2531 - DNA, 11 bp, Homo sapiens
tgacaattttg

SEQ ID NO: 2532 - DNA, 11 bp, Homo sapiens
tgcatctgtgc

SEQ ID NO: 2533 - DNA, 11 bp, Homo sapiens
accgaaacttg

SEQ ID NO: 2534 - DNA, 11 bp, Homo sapiens
aaggggccttt

SEQ ID NO: 2535 - DNA, 11 bp, Homo sapiens
ccactgtactt

SEQ ID NO: 2536 - DNA, 11 bp, Homo sapiens
atgcttttcac

SEQ ID NO: 2537 - DNA, 11 bp, Homo sapiens
gggtcaggaga

SEQ ID NO: 2538 - DNA, 11 bp, Homo sapiens
cacatccttac

SEQ ID NO: 2539 - DNA, 11 bp, Homo sapiens
aatattaaaaa

SEQ ID NO: 2540 - DNA, 11 bp, Homo sapiens
ggcccccctcc

SEQ ID NO: 2541 - DNA, 11 bp, Homo sapiens
tctaaaaaaaa

SEQ ID NO: 2542 - DNA, 11 bp, Homo sapiens
cgcctataatc

SEQ ID NO: 2543 - DNA, 11 bp, Homo sapiens
aaggatgccaa

SEQ ID NO: 2544 - DNA, 11 bp, Homo sapiens
gtccctgcctt

SEQ ID NO: 2545 - DNA, 11 bp, Homo sapiens
cacccaatggg

SEQ ID NO: 2546 - DNA, 11 bp, Homo sapiens
caggaggaaag

SEQ ID NO: 2547 - DNA, 11 bp, Homo sapiens
tgggcccgtgt

SEQ ID NO: 2548 - DNA, 11 bp, Homo sapiens
tgtgacctctc

SEQ ID NO: 2549 - DNA, 11 bp, Homo sapiens
ggaggcggagg

SEQ ID NO: 2550 - DNA, 11 bp, Homo sapiens
ggacagctcag

SEQ ID NO: 2551 - DNA, 11 bp, Homo sapiens
gttaccagttt

SEQ ID NO: 2552 - DNA, 11 bp, Homo sapiens
caacttaagtg

SEQ ID NO: 2553 - DNA, 11 bp, Homo sapiens
ccagtgcactc

SEQ ID NO: 2554 - DNA, 11 bp, Homo sapiens
tgcacacacac

SEQ ID NO: 2555 - DNA, 11 bp, Homo sapiens
cctctaatccc

SEQ ID NO: 2556 - DNA, 11 bp, Homo sapiens
aagcgctctcg

SEQ ID NO: 2557 - DNA, 11 bp, Homo sapiens
cttgtgtgtag

SEQ ID NO: 2558 - DNA, 11 bp, Homo sapiens
gaaatctgtcc

SEQ ID NO: 2559 - DNA, 11 bp, Homo sapiens
caaggagatct

SEQ ID NO: 2560 - DNA, 11 bp, Homo sapiens
caaaatactgc

SEQ ID NO: 2561 - DNA, 11 bp, Homo sapiens
agatagcatta

SEQ ID NO: 2562 - DNA, 11 bp, Homo sapiens
agaatgtacgg

SEQ ID NO: 2563 - DNA, 11 bp, Homo sapiens
ccacgcactgt

SEQ ID NO: 2564 - DNA, 11 bp, Homo sapiens
cacccctcagg

SEQ ID NO: 2565 - DNA, 11 bp, Homo sapiens
attacaccact

SEQ ID NO: 2566 - DNA, 11 bp, Homo sapiens
aacccagaagg

SEQ ID NO: 2567 - DNA, 11 bp, Homo sapiens
gtggtgtatgc

SEQ ID NO: 2568 - DNA, 11 bp, Homo sapiens
aactataaacg

SEQ ID NO: 2569 - DNA, 11 bp, Homo sapiens
aagtttataga

SEQ ID NO: 2570 - DNA, 11 bp, Homo sapiens
gtgaagttgcg

SEQ ID NO: 2571 - DNA, 11 bp, Homo sapiens
ccctcctgctc

SEQ ID NO: 2572 - DNA, 11 bp, Homo sapiens
aacccaaactc

SEQ ID NO: 2573 - DNA, 11 bp, Homo sapiens
gttgggacatc

SEQ ID NO: 2574 - DNA, 11 bp, Homo sapiens
ccgctgatcca

SEQ ID NO: 2575 - DNA, 11 bp, Homo sapiens
ggatacaacct

SEQ ID NO: 2576 - DNA, 11 bp, Homo sapiens
atttaaaaaaa

SEQ ID NO: 2577 - DNA, 11 bp, Homo sapiens
catttaaaaaa

SEQ ID NO: 2578 - DNA, 11 bp, Homo sapiens
tatacctgtgt

SEQ ID NO: 2579 - DNA, 11 bp, Homo sapiens
gtgaatgacaa

SEQ ID NO: 2580 - DNA, 11 bp, Homo sapiens
cccctcccctc

SEQ ID NO: 2581 - DNA, 11 bp, Homo sapiens
caatttatatc

SEQ ID NO: 2582 - DNA, 11 bp, Homo sapiens
acagattcaat

SEQ ID NO: 2583 - DNA, 11 bp, Homo sapiens
agtgtatcaca

SEQ ID NO: 2584 - DNA, 11 bp, Homo sapiens
gagggagttgg

SEQ ID NO: 2585 - DNA, 11 bp, Homo sapiens
taacatccctg

SEQ ID NO: 2586 - DNA, 11 bp, Homo sapiens
gggagcttgta

SEQ ID NO: 2587 - DNA, 11 bp, Homo sapiens
tagatgtgatt

SEQ ID NO: 2588 - DNA, 11 bp, Homo sapiens
tatagatcgtc

SEQ ID NO: 2589 - DNA, 11 bp, Homo sapiens
aagttttgatt

SEQ ID NO: 2590 - DNA, 11 bp, Homo sapiens
ccaatagggcc

SEQ ID NO: 2591 - DNA, 11 bp, Homo sapiens
tcgcacacttt

SEQ ID NO: 2592 - DNA, 11 bp, Homo sapiens
aaaggttgcag

SEQ ID NO: 2593 - DNA, 11 bp, Homo sapiens
agctttccaat

SEQ ID NO: 2594 - DNA, 11 bp, Homo sapiens
tagcttcctta

SEQ ID NO: 2595 - DNA, 11 bp, Homo sapiens
ctgttaccttc

SEQ ID NO: 2596 - DNA, 11 bp, Homo sapiens
cttatgtatta

SEQ ID NO: 2597 - DNA, 11 bp, Homo sapiens
tcaacacagtt

SEQ ID NO: 2598 - DNA, 11 bp, Homo sapiens
tatttcgtaaa

SEQ ID NO: 2599 - DNA, 11 bp, Homo sapiens
tacctgtaatc

SEQ ID NO: 2600 - DNA, 11 bp, Homo sapiens
aatatgtgtac

SEQ ID NO: 2601 - DNA, 11 bp, Homo sapiens
tgaccaggccc

SEQ ID NO: 2602 - DNA, 11 bp, Homo sapiens
aaatggatgca

SEQ ID NO: 2603 - DNA, 11 bp, Homo sapiens
gtgaacccacg

SEQ ID NO: 2604 - DNA, 11 bp, Homo sapiens
tcctatccagg

SEQ ID NO: 2605 - DNA, 11 bp, Homo sapiens
tatatatgggg

SEQ ID NO: 2606 - DNA, 11 bp, Homo sapiens
gcaggtactga

SEQ ID NO: 2607 - DNA, 11 bp, Homo sapiens
gcggcgtgtgc

SEQ ID NO: 2608 - DNA, 11 bp, Homo sapiens
ttatttcttct

SEQ ID NO: 2609 - DNA, 11 bp, Homo sapiens
gtggcgcacat

SEQ ID NO: 2610 - DNA, 11 bp, Homo sapiens
tgtttcattct

SEQ ID NO: 2611 - DNA, 11 bp, Homo sapiens
tttaaatagcc

SEQ ID NO: 2612 - DNA, 11 bp, Homo sapiens
agaaataaatg

SEQ ID NO: 2613 - DNA, 11 bp, Homo sapiens
taaagcactta

SEQ ID NO: 2614 - DNA, 11 bp, Homo sapiens
gaaataggaag

SEQ ID NO: 2615 - DNA, 11 bp, Homo sapiens
gatcatactcc

SEQ ID NO: 2616 - DNA, 11 bp, Homo sapiens
cataatgtcat

SEQ ID NO: 2617 - DNA, 11 bp, Homo sapiens
gtgtttttgtt

SEQ ID NO: 2618 - DNA, 11 bp, Homo sapiens
agaatttaaaa

SEQ ID NO: 2619 - DNA, 11 bp, Homo sapiens
caaacattcaa

SEQ ID NO: 2620 - DNA, 11 bp, Homo sapiens
tcctttggatt

SEQ ID NO: 2621 - DNA, 11 bp, Homo sapiens
ttctttcctga

SEQ ID NO: 2622 - DNA, 11 bp, Homo sapiens
aaaaaggtgga

SEQ ID NO: 2623 - DNA, 11 bp, Homo sapiens
ggtatggcagg

SEQ ID NO: 2624 - DNA, 11 bp, Homo sapiens
aatggaaggtg

SEQ ID NO: 2625 - DNA, 11 bp, Homo sapiens
ggggctttctg

SEQ ID NO: 2626 - DNA, 11 bp, Homo sapiens
aaaataaactt

SEQ ID NO: 2627 - DNA, 11 bp, Homo sapiens
taatatgagca

SEQ ID NO: 2628 - DNA, 11 bp, Homo sapiens
atatactgtag

SEQ ID NO: 2629 - DNA, 11 bp, Homo sapiens
cgcaccgggta

SEQ ID NO: 2630 - DNA, 11 bp, Homo sapiens
ggaggtggggc

SEQ ID NO: 2631 - DNA, 11 bp, Homo sapiens
ggaaatgtcaa

SEQ ID NO: 2632 - DNA, 11 bp, Homo sapiens
tgttctggaga

SEQ ID NO: 2633 - DNA, 11 bp, Homo sapiens
tacttgggagg

SEQ ID NO: 2634 - DNA, 11 bp, Homo sapiens
gctgttcagaa

SEQ ID NO: 2635 - DNA, 11 bp, Homo sapiens
ctgtctgtggc

SEQ ID NO: 2636 - DNA, 11 bp, Homo sapiens
gcacctagtgc

SEQ ID NO: 2637 - DNA, 11 bp, Homo sapiens
gagcctgtaaa

SEQ ID NO: 2638 - DNA, 11 bp, Homo sapiens
agcgagagagg

SEQ ID NO: 2639 - DNA, 11 bp, Homo sapiens
agtagcttgaa

SEQ ID NO: 2640 - DNA, 11 bp, Homo sapiens
ctgtcagcggc

SEQ ID NO: 2641 - DNA, 11 bp, Homo sapiens
gcccagcggcc

SEQ ID NO: 2642 - DNA, 11 bp, Homo sapiens
atggtgcacac

SEQ ID NO: 2643 - DNA, 11 bp, Homo sapiens
atgtcgtggtc

SEQ ID NO: 2644 - DNA, 11 bp, Homo sapiens
gcccttcccct

SEQ ID NO: 2645 - DNA, 11 bp, Homo sapiens
tgagttttaca

SEQ ID NO: 2646 - DNA, 11 bp, Homo sapiens
cggggcgcgca

SEQ ID NO: 2647 - DNA, 11 bp, Homo sapiens
aggaagctgag

SEQ ID NO: 2648 - DNA, 11 bp, Homo sapiens
cacctgtagtt

SEQ ID NO: 2649 - DNA, 11 bp, Homo sapiens
ccctgggcttc

SEQ ID NO: 2650 - DNA, 11 bp, Homo sapiens
taaggcctttc

SEQ ID NO: 2651 - DNA, 11 bp, Homo sapiens
aaatcaggaac

SEQ ID NO: 2652 - DNA, 11 bp, Homo sapiens
ggaaaccccag

SEQ ID NO: 2653 - DNA, 11 bp, Homo sapiens
acgcacattat

SEQ ID NO: 2654 - DNA, 11 bp, Homo sapiens
cttctcttgag

SEQ ID NO: 2655 - DNA, 11 bp, Homo sapiens
ttcctccaaaa

SEQ ID NO: 2656 - DNA, 11 bp, Homo sapiens
gatgaggagac

SEQ ID NO: 2657 - DNA, 11 bp, Homo sapiens
ctgtgagacct

SEQ ID NO: 2658 - DNA, 11 bp, Homo sapiens
ccacacaagca

SEQ ID NO: 2659 - DNA, 11 bp, Homo sapiens
ttggccaggat

SEQ ID NO: 2660 - DNA, 11 bp, Homo sapiens
ctccctctgcc

SEQ ID NO: 2661 - DNA, 11 bp, Homo sapiens
gaataaatgtt

SEQ ID NO: 2662 - DNA, 11 bp, Homo sapiens
accagctgtcc

SEQ ID NO: 2663 - DNA, 11 bp, Homo sapiens
cttctatgtag

SEQ ID NO: 2664 - DNA, 11 bp, Homo sapiens
gtttcagttac

SEQ ID NO: 2665 - DNA, 11 bp, Homo sapiens
ggccagtaaca

SEQ ID NO: 2666 - DNA, 11 bp, Homo sapiens
ggaggtgggag

SEQ ID NO: 2667 - DNA, 11 bp, Homo sapiens
tgcaatatttc

SEQ ID NO: 2668 - DNA, 11 bp, Homo sapiens
cagacttttgg

SEQ ID NO: 2669 - DNA, 11 bp, Homo sapiens
gtggtgcacgc

SEQ ID NO: 2670 - DNA, 11 bp, Homo sapiens
gaccaggccct

SEQ ID NO: 2671 - DNA, 11 bp, Homo sapiens
cggcagagctg

SEQ ID NO: 2672 - DNA, 11 bp, Homo sapiens
aacccaaaaag

SEQ ID NO: 2673 - DNA, 11 bp, Homo sapiens
ttgccttgctt

SEQ ID NO: 2674 - DNA, 11 bp, Homo sapiens
gttaaatcctg

SEQ ID NO: 2675 - DNA, 11 bp, Homo sapiens
taagtaaagtg

SEQ ID NO: 2676 - DNA, 11 bp, Homo sapiens
atcaaaaaaaa

SEQ ID NO: 2677 - DNA, 11 bp, Homo sapiens
acctatttgtg

SEQ ID NO: 2678 - DNA, 11 bp, Homo sapiens
gaatgtttttt

SEQ ID NO: 2679 - DNA, 11 bp, Homo sapiens
gttgtgccact

SEQ ID NO: 2680 - DNA, 11 bp, Homo sapiens
cactttaaagt

SEQ ID NO: 2681 - DNA, 11 bp, Homo sapiens
aaataaaaaat

SEQ ID NO: 2682 - DNA, 11 bp, Homo sapiens
aaggtgaagta

SEQ ID NO: 2683 - DNA, 11 bp, Homo sapiens
ctttaagaaag

SEQ ID NO: 2684 - DNA, 11 bp, Homo sapiens
gtggctcttgc

SEQ ID NO: 2685 - DNA, 11 bp, Homo sapiens
tctctactaaa

SEQ ID NO: 2686 - DNA, 11 bp, Homo sapiens
cccttccccgg

SEQ ID NO: 2687 - DNA, 11 bp, Homo sapiens
acctataagta

SEQ ID NO: 2688 - DNA, 11 bp, Homo sapiens
ttatacaaaaa

SEQ ID NO: 2689 - DNA, 11 bp, Homo sapiens
ctcactagtgg

SEQ ID NO: 2690 - DNA, 11 bp, Homo sapiens
gcgaaacccct

SEQ ID NO: 2691 - DNA, 11 bp, Homo sapiens
gactgttgctg

SEQ ID NO: 2692 - DNA, 11 bp, Homo sapiens
ccactgcagtc

SEQ ID NO: 2693 - DNA, 11 bp, Homo sapiens
tcaacaaattt

SEQ ID NO: 2694 - DNA, 11 bp, Homo sapiens
ggacctttaat

SEQ ID NO: 2695 - DNA, 11 bp, Homo sapiens
gatactttgca

SEQ ID NO: 2696 - DNA, 11 bp, Homo sapiens
tattgaacacg

SEQ ID NO: 2697 - DNA, 11 bp, Homo sapiens
atgcaactggg

SEQ ID NO: 2698 - DNA, 11 bp, Homo sapiens
ttgccttctct

SEQ ID NO: 2699 - DNA, 11 bp, Homo sapiens
ttttgtatgtc

SEQ ID NO: 2700 - DNA, 11 bp, Homo sapiens
gaaatgcagcc

SEQ ID NO: 2701 - DNA, 11 bp, Homo sapiens
tggtaggttct

SEQ ID NO: 2702 - DNA, 11 bp, Homo sapiens
acaagatattt

SEQ ID NO: 2703 - DNA, 11 bp, Homo sapiens
accagcatcct

SEQ ID NO: 2704 - DNA, 11 bp, Homo sapiens
cctgtcacgat

SEQ ID NO: 2705 - DNA, 11 bp, Homo sapiens
gtgcagagagc

SEQ ID NO: 2706 - DNA, 11 bp, Homo sapiens
atgttacctaa

SEQ ID NO: 2707 - DNA, 11 bp, Homo sapiens
ctatttagtta

SEQ ID NO: 2708 - DNA, 11 bp, Homo sapiens
caagtagcaaa

SEQ ID NO: 2709 - DNA, 11 bp, Homo sapiens
tttaagggaat

SEQ ID NO: 2710 - DNA, 11 bp, Homo sapiens
tgcactgtggt

SEQ ID NO: 2711 - DNA, 11 bp, Homo sapiens
ccatttcactc

SEQ ID NO: 2712 - DNA, 11 bp, Homo sapiens
tttttctcccc

SEQ ID NO: 2713 - DNA, 11 bp, Homo sapiens
ctgaacctgac

SEQ ID NO: 2714 - DNA, 11 bp, Homo sapiens
tctacaaaaaa

SEQ ID NO: 2715 - DNA, 11 bp, Homo sapiens
gattaaataat

SEQ ID NO: 2716 - DNA, 11 bp, Homo sapiens
ctttgttagaa

SEQ ID NO: 2717 - DNA, 11 bp, Homo sapiens
tgaagccttgc

SEQ ID NO: 2718 - DNA, 11 bp, Homo sapiens
tagccaatgtt

SEQ ID NO: 2719 - DNA, 11 bp, Homo sapiens
gcctccataaa

SEQ ID NO: 2720 - DNA, 11 bp, Homo sapiens
aatttgagtgt

SEQ ID NO: 2721 - DNA, 11 bp, Homo sapiens
ttttaaagagg

SEQ ID NO: 2722 - DNA, 11 bp, Homo sapiens
agccattgcac

SEQ ID NO: 2723 - DNA, 11 bp, Homo sapiens
tttaaaaatta

SEQ ID NO: 2724 - DNA, 11 bp, Homo sapiens
tattcaggggc

SEQ ID NO: 2725 - DNA, 11 bp, Homo sapiens
tattctgaaca

SEQ ID NO: 2726 - DNA, 11 bp, Homo sapiens
cttacagccaa

SEQ ID NO: 2727 - DNA, 11 bp, Homo sapiens
agtgacaaact

SEQ ID NO: 2728 - DNA, 11 bp, Homo sapiens
ttggcaaaaaa

SEQ ID NO: 2729 - DNA, 11 bp, Homo sapiens
gctgacactga

SEQ ID NO: 2730 - DNA, 11 bp, Homo sapiens
aatcagaattt

SEQ ID NO: 2731 - DNA, 11 bp, Homo sapiens
tgaccatttct

SEQ ID NO: 2732 - DNA, 11 bp, Homo sapiens
ccaaagcttcc

SEQ ID NO: 2733 - DNA, 11 bp, Homo sapiens
atgttcaattt

SEQ ID NO: 2734 - DNA, 11 bp, Homo sapiens
ccacacaaaaa

SEQ ID NO: 2735 - DNA, 11 bp, Homo sapiens
gccgggcgcag

SEQ ID NO: 2736 - DNA, 11 bp, Homo sapiens
tcatcacatta

SEQ ID NO: 2737 - DNA, 11 bp, Homo sapiens
ttacccaggct

SEQ ID NO: 2738 - DNA, 11 bp, Homo sapiens
cctcagtttgg

SEQ ID NO: 2739 - DNA, 11 bp, Homo sapiens
cacctatagtc

SEQ ID NO: 2740 - DNA, 11 bp, Homo sapiens
ggtgcttcttt

SEQ ID NO: 2741 - DNA, 11 bp, Homo sapiens
gagtccataaa

SEQ ID NO: 2742 - DNA, 11 bp, Homo sapiens
ctaacaggatt

SEQ ID NO: 2743 - DNA, 11 bp, Homo sapiens
tcgaaacccca

SEQ ID NO: 2744 - DNA, 11 bp, Homo sapiens
aaggagtgaaa

SEQ ID NO: 2745 - DNA, 11 bp, Homo sapiens
atccctgtgag

SEQ ID NO: 2746 - DNA, 11 bp, Homo sapiens
ctccatcggct

SEQ ID NO: 2747 - DNA, 11 bp, Homo sapiens
gtggaaccccg

SEQ ID NO: 2748 - DNA, 11 bp, Homo sapiens
gaccacgaata

SEQ ID NO: 2749 - DNA, 11 bp, Homo sapiens
cccttgtgact

SEQ ID NO: 2750 - DNA, 11 bp, Homo sapiens
gaccgcggctt

SEQ ID NO: 2751 - DNA, 11 bp, Homo sapiens
ctaccaggcct

SEQ ID NO: 2752 - DNA, 11 bp, Homo sapiens
ttccggttcca

SEQ ID NO: 2753 - DNA, 11 bp, Homo sapiens
gatagcacagt

SEQ ID NO: 2754 - DNA, 11 bp, Homo sapiens
tactgtatgtc

SEQ ID NO: 2755 - DNA, 11 bp, Homo sapiens
taatttctcaa

SEQ ID NO: 2756 - DNA, 11 bp, Homo sapiens
gcaaaaccccc

SEQ ID NO: 2757 - DNA, 11 bp, Homo sapiens
gtgcggtacct

SEQ ID NO: 2758 - DNA, 11 bp, Homo sapiens
tactgcaaaaa

SEQ ID NO: 2759 - DNA, 11 bp, Homo sapiens
tgccttagtaa

SEQ ID NO: 2760 - DNA, 11 bp, Homo sapiens
tactgtgatgt

SEQ ID NO: 2761 - DNA, 11 bp, Homo sapiens
ggggctggagg

SEQ ID NO: 2762 - DNA, 11 bp, Homo sapiens
aacgctgcgaa

SEQ ID NO: 2763 - DNA, 11 bp, Homo sapiens
atggtgggcac

SEQ ID NO: 2764 - DNA, 11 bp, Homo sapiens
ttgacttttgc

SEQ ID NO: 2765 - DNA, 11 bp, Homo sapiens
cctgtaatccg

SEQ ID NO: 2766 - DNA, 11 bp, Homo sapiens
ctgtgaaaaaa

SEQ ID NO: 2767 - DNA, 11 bp, Homo sapiens
cagtgcagtat

SEQ ID NO: 2768 - DNA, 11 bp, Homo sapiens
agccattgtgc

SEQ ID NO: 2769 - DNA, 11 bp, Homo sapiens
ggcagggtcga

SEQ ID NO: 2770 - DNA, 11 bp, Homo sapiens
taattttgaaa

SEQ ID NO: 2771 - DNA, 11 bp, Homo sapiens
tctggcatagc

SEQ ID NO: 2772 - DNA, 11 bp, Homo sapiens
ttttatggaat

SEQ ID NO: 2773 - DNA, 11 bp, Homo sapiens
gatttttaaaa

SEQ ID NO: 2774 - DNA, 11 bp, Homo sapiens
gacggccagag

SEQ ID NO: 2775 - DNA, 11 bp, Homo sapiens
ttctctgctca

SEQ ID NO: 2776 - DNA, 11 bp, Homo sapiens
tggaaggaccg

SEQ ID NO: 2777 - DNA, 11 bp, Homo sapiens
tgggactccag

SEQ ID NO: 2778 - DNA, 11 bp, Homo sapiens
tggaattccct

SEQ ID NO: 2779 - DNA, 11 bp, Homo sapiens
gctctcccccc

SEQ ID NO: 2780 - DNA, 11 bp, Homo sapiens
agtggagggaa

SEQ ID NO: 2781 - DNA, 11 bp, Homo sapiens
agccaccgcac

SEQ ID NO: 2782 - DNA, 11 bp, Homo sapiens
tctgaagtcaa

SEQ ID NO: 2783 - DNA, 11 bp, Homo sapiens
aacgcgaacac

SEQ ID NO: 2784 - DNA, 11 bp, Homo sapiens
gtggcgcacac

SEQ ID NO: 2785 - DNA, 11 bp, Homo sapiens
atggtgccact

SEQ ID NO: 2786 - DNA, 11 bp, Homo sapiens
tcagaaaaaaa

SEQ ID NO: 2787 - DNA, 11 bp, Homo sapiens
tccccgtggct

SEQ ID NO: 2788 - DNA, 11 bp, Homo sapiens
aataggggaaa

SEQ ID NO: 2789 - DNA, 11 bp, Homo sapiens
agtccttatgc

SEQ ID NO: 2790 - DNA, 11 bp, Homo sapiens
tccttggacct

SEQ ID NO: 2791 - DNA, 11 bp, Homo sapiens
attttgcttgg

SEQ ID NO: 2792 - DNA, 11 bp, Homo sapiens
cttgtgttata

SEQ ID NO: 2793 - DNA, 11 bp, Homo sapiens
cagcttaatta

SEQ ID NO: 2794 - DNA, 11 bp, Homo sapiens
ttggtcaggtt

SEQ ID NO: 2795 - DNA, 11 bp, Homo sapiens
gtaattctcaa

SEQ ID NO: 2796 - DNA, 11 bp, Homo sapiens
gccccacagcc

SEQ ID NO: 2797 - DNA, 11 bp, Homo sapiens
gtatacaacaa

SEQ ID NO: 2798 - DNA, 11 bp, Homo sapiens
agctagggaag

SEQ ID NO: 2799 - DNA, 11 bp, Homo sapiens
taattgaaata

SEQ ID NO: 2800 - DNA, 11 bp, Homo sapiens
tgatgtgatca

SEQ ID NO: 2801 - DNA, 11 bp, Homo sapiens
tgtgagcccct

SEQ ID NO: 2802 - DNA, 11 bp, Homo sapiens
tacaagttttg

SEQ ID NO: 2803 - DNA, 11 bp, Homo sapiens
ggtaccaaaaa

SEQ ID NO: 2804 - DNA, 11 bp, Homo sapiens
cctggctcaaa

SEQ ID NO: 2805 - DNA, 11 bp, Homo sapiens
taagccctttt

SEQ ID NO: 2806 - DNA, 11 bp, Homo sapiens
agaccaatgaa

SEQ ID NO: 2807 - DNA, 11 bp, Homo sapiens
tgtttgactgt

SEQ ID NO: 2808 - DNA, 11 bp, Homo sapiens
gaccagctgcc

SEQ ID NO: 2809 - DNA, 11 bp, Homo sapiens
agttgaagaag

SEQ ID NO: 2810 - DNA, 11 bp, Homo sapiens
agtagaagaat

SEQ ID NO: 2811 - DNA, 11 bp, Homo sapiens
gagcccagccc

SEQ ID NO: 2812 - DNA, 11 bp, Homo sapiens
cacatttaatt

SEQ ID NO: 2813 - DNA, 11 bp, Homo sapiens
acatattgagc

SEQ ID NO: 2814 - DNA, 11 bp, Homo sapiens
tttgactgata

SEQ ID NO: 2815 - DNA, 11 bp, Homo sapiens
accaatacact

SEQ ID NO: 2816 - DNA, 11 bp, Homo sapiens
gtgagacccta

SEQ ID NO: 2817 - DNA, 11 bp, Homo sapiens
aagatattctc

SEQ ID NO: 2818 - DNA, 11 bp, Homo sapiens
gtggtgcaccc

SEQ ID NO: 2819 - DNA, 11 bp, Homo sapiens
ttcttgcagca

SEQ ID NO: 2820 - DNA, 11 bp, Homo sapiens
cttaatatatt

SEQ ID NO: 2821 - DNA, 11 bp, Homo sapiens
gtgatacccca

SEQ ID NO: 2822 - DNA, 11 bp, Homo sapiens
gaaaatattcc

SEQ ID NO: 2823 - DNA, 11 bp, Homo sapiens
atgaaaccttg

SEQ ID NO: 2824 - DNA, 11 bp, Homo sapiens
caagatgaacc

SEQ ID NO: 2825 - DNA, 11 bp, Homo sapiens
acaagaaaaaa

SEQ ID NO: 2826 - DNA, 11 bp, Homo sapiens
tttcgattttt

SEQ ID NO: 2827 - DNA, 11 bp, Homo sapiens
ataaaaccctg

SEQ ID NO: 2828 - DNA, 11 bp, Homo sapiens
gtggcacgcat

SEQ ID NO: 2829 - DNA, 11 bp, Homo sapiens
aggtgtttctt

SEQ ID NO: 2830 - DNA, 11 bp, Homo sapiens
ctttctgttat

SEQ ID NO: 2831 - DNA, 11 bp, Homo sapiens
ctccaaatccc

SEQ ID NO: 2832 - DNA, 11 bp, Homo sapiens
gggggctcctt

SEQ ID NO: 2833 - DNA, 11 bp, Homo sapiens
cttgaaaaaaa

SEQ ID NO: 2834 - DNA, 11 bp, Homo sapiens
aaggtgaggac

SEQ ID NO: 2835 - DNA, 11 bp, Homo sapiens
cagggggttca

SEQ ID NO: 2836 - DNA, 11 bp, Homo sapiens
ccattattctt

SEQ ID NO: 2837 - DNA, 11 bp, Homo sapiens
tgttttttgtg

SEQ ID NO: 2838 - DNA, 11 bp, Homo sapiens
tgatccatcct

SEQ ID NO: 2839 - DNA, 11 bp, Homo sapiens
attagtgttgg

SEQ ID NO: 2840 - DNA, 11 bp, Homo sapiens
gctatatttca

SEQ ID NO: 2841 - DNA, 11 bp, Homo sapiens
gtgctatcctg

SEQ ID NO: 2842 - DNA, 11 bp, Homo sapiens
gggagaccctg

SEQ ID NO: 2843 - DNA, 11 bp, Homo sapiens
ctttcaatgtt

SEQ ID NO: 2844 - DNA, 11 bp, Homo sapiens
ccattcttttc

SEQ ID NO: 2845 - DNA, 11 bp, Homo sapiens
cctctttaaag

SEQ ID NO: 2846 - DNA, 11 bp, Homo sapiens
aagaagggatc

SEQ ID NO: 2847 - DNA, 11 bp, Homo sapiens
aaccgcaccca

SEQ ID NO: 2848 - DNA, 11 bp, Homo sapiens
gtaaatgagta

SEQ ID NO: 2849 - DNA, 11 bp, Homo sapiens
taaacaagcaa

SEQ ID NO: 2850 - DNA, 11 bp, Homo sapiens
tgtatgtggta

SEQ ID NO: 2851 - DNA, 11 bp, Homo sapiens
agccagggtaa

SEQ ID NO: 2852 - DNA, 11 bp, Homo sapiens
ttttgatcact

SEQ ID NO: 2853 - DNA, 11 bp, Homo sapiens
cagctggcact

SEQ ID NO: 2854 - DNA, 11 bp, Homo sapiens
ttaagggatga

SEQ ID NO: 2855 - DNA, 11 bp, Homo sapiens
cagaatgagcc

SEQ ID NO: 2856 - DNA, 11 bp, Homo sapiens
tgaccacctac

SEQ ID NO: 2857 - DNA, 11 bp, Homo sapiens
gtggcagccgg

SEQ ID NO: 2858 - DNA, 11 bp, Homo sapiens
gaagccattgt

SEQ ID NO: 2859 - DNA, 11 bp, Homo sapiens
tatatggatgg

SEQ ID NO: 2860 - DNA, 11 bp, Homo sapiens
gtgcccggcac

SEQ ID NO: 2861 - DNA, 11 bp, Homo sapiens
gaccttatttt

SEQ ID NO: 2862 - DNA, 11 bp, Homo sapiens
ctgggccagcc

SEQ ID NO: 2863 - DNA, 11 bp, Homo sapiens
gccaaggggcc

SEQ ID NO: 2864 - DNA, 11 bp, Homo sapiens
tcctacaatct

SEQ ID NO: 2865 - DNA, 11 bp, Homo sapiens
taacttaagca

SEQ ID NO: 2866 - DNA, 11 bp, Homo sapiens
tgtaaaaaaaa

SEQ ID NO: 2867 - DNA, 11 bp, Homo sapiens
taccctagaac

SEQ ID NO: 2868 - DNA, 11 bp, Homo sapiens
tcagcaataaa

SEQ ID NO: 2869 - DNA, 11 bp, Homo sapiens
cctgtaatcca

SEQ ID NO: 2870 - DNA, 11 bp, Homo sapiens
ttgtggaaatc

SEQ ID NO: 2871 - DNA, 11 bp, Homo sapiens
atgggcactga

SEQ ID NO: 2872 - DNA, 11 bp, Homo sapiens
gctgacggaaa

SEQ ID NO: 2873 - DNA, 11 bp, Homo sapiens
gtgcctcggag

SEQ ID NO: 2874 - DNA, 11 bp, Homo sapiens
atgctaaaaaa

SEQ ID NO: 2875 - DNA, 11 bp, Homo sapiens
ctgctgcccca

SEQ ID NO: 2876 - DNA, 11 bp, Homo sapiens
tgagtggtagc

SEQ ID NO: 2877 - DNA, 11 bp, Homo sapiens
gtgagaccttg

SEQ ID NO: 2878 - DNA, 11 bp, Homo sapiens
gtagcaggtgt

SEQ ID NO: 2879 - DNA, 11 bp, Homo sapiens
gtctgggggat

SEQ ID NO: 2880 - DNA, 11 bp, Homo sapiens
ttccactaacc

SEQ ID NO: 2881 - DNA, 11 bp, Homo sapiens
tgaagcagtaa

SEQ ID NO: 2882 - DNA, 11 bp, Homo sapiens
accgcttgttt

SEQ ID NO: 2883 - DNA, 11 bp, Homo sapiens
ctggccaggct

SEQ ID NO: 2884 - DNA, 11 bp, Homo sapiens
agattcaaact

SEQ ID NO: 2885 - DNA, 11 bp, Homo sapiens
agttgtcccgg

SEQ ID NO: 2886 - DNA, 11 bp, Homo sapiens
ctgactgtcct

SEQ ID NO: 2887 - DNA, 11 bp, Homo sapiens
actgtattgga

SEQ ID NO: 2888 - DNA, 11 bp, Homo sapiens
caaataacaag

SEQ ID NO: 2889 - DNA, 11 bp, Homo sapiens
acttgtaatta

SEQ ID NO: 2890 - DNA, 11 bp, Homo sapiens
gacgacattcg

SEQ ID NO: 2891 - DNA, 11 bp, Homo sapiens
tacaaagatgt

SEQ ID NO: 2892 - DNA, 11 bp, Homo sapiens
ttttcccctga

SEQ ID NO: 2893 - DNA, 11 bp, Homo sapiens
cttggatggct

SEQ ID NO: 2894 - DNA, 11 bp, Homo sapiens
gtaaaatgcaa

SEQ ID NO: 2895 - DNA, 11 bp, Homo sapiens
cgatcactgac

SEQ ID NO: 2896 - DNA, 11 bp, Homo sapiens
attgagtccag

SEQ ID NO: 2897 - DNA, 11 bp, Homo sapiens
gggcttactgt

SEQ ID NO: 2898 - DNA, 11 bp, Homo sapiens
tacctattgtg

SEQ ID NO: 2899 - DNA, 11 bp, Homo sapiens
ctttaaggttt

SEQ ID NO: 2900 - DNA, 11 bp, Homo sapiens
atgctctattt

SEQ ID NO: 2901 - DNA, 11 bp, Homo sapiens
gcagggaaata

SEQ ID NO: 2902 - DNA, 11 bp, Homo sapiens
aaaatgacaga

SEQ ID NO: 2903 - DNA, 11 bp, Homo sapiens
agcccactgct

SEQ ID NO: 2904 - DNA, 11 bp, Homo sapiens
ggccagtgagg

SEQ ID NO: 2905 - DNA, 11 bp, Homo sapiens
ccttgcctgaa

SEQ ID NO: 2906 - DNA, 11 bp, Homo sapiens
aaagtgtattt

SEQ ID NO: 2907 - DNA, 11 bp, Homo sapiens
cagctttgctg

SEQ ID NO: 2908 - DNA, 11 bp, Homo sapiens
tgagcactcga

SEQ ID NO: 2909 - DNA, 11 bp, Homo sapiens
cctgtaatttc

SEQ ID NO: 2910 - DNA, 11 bp, Homo sapiens
agtcaccagca

SEQ ID NO: 2911 - DNA, 11 bp, Homo sapiens
ggtacacatac

SEQ ID NO: 2912 - DNA, 11 bp, Homo sapiens
tgaaagtgatt

SEQ ID NO: 2913 - DNA, 11 bp, Homo sapiens
cagaggcgtcc

SEQ ID NO: 2914 - DNA, 11 bp, Homo sapiens
tttgttgttga

SEQ ID NO: 2915 - DNA, 11 bp, Homo sapiens
tgcccaacttc

SEQ ID NO: 2916 - DNA, 11 bp, Homo sapiens
tagtatggcta

SEQ ID NO: 2917 - DNA, 11 bp, Homo sapiens
ctatgtcttta

SEQ ID NO: 2918 - DNA, 11 bp, Homo sapiens
caagtaactag

SEQ ID NO: 2919 - DNA, 11 bp, Homo sapiens
cttccttgtag

SEQ ID NO: 2920 - DNA, 11 bp, Homo sapiens
gaagattgaga

SEQ ID NO: 2921 - DNA, 11 bp, Homo sapiens
ccgtgaagttt

SEQ ID NO: 2922 - DNA, 11 bp, Homo sapiens
gtgatgtgcgc

SEQ ID NO: 2923 - DNA, 11 bp, Homo sapiens
tgattacaatc

SEQ ID NO: 2924 - DNA, 11 bp, Homo sapiens
tttcaatacca

SEQ ID NO: 2925 - DNA, 11 bp, Homo sapiens
gcaaccgtact

SEQ ID NO: 2926 - DNA, 11 bp, Homo sapiens
ctatgttctgt

SEQ ID NO: 2927 - DNA, 11 bp, Homo sapiens
cctaacgatac

SEQ ID NO: 2928 - DNA, 11 bp, Homo sapiens
taaaggctttt

SEQ ID NO: 2929 - DNA, 11 bp, Homo sapiens
gacacagttat

SEQ ID NO: 2930 - DNA, 11 bp, Homo sapiens
tgtagaaaaaa

SEQ ID NO: 2931 - DNA, 11 bp, Homo sapiens
ctcatatgtta

SEQ ID NO: 2932 - DNA, 11 bp, Homo sapiens
ggagccaggcc

SEQ ID NO: 2933 - DNA, 11 bp, Homo sapiens
gtgaaacacca

SEQ ID NO: 2934 - DNA, 11 bp, Homo sapiens
gctctcggcgg

SEQ ID NO: 2935 - DNA, 11 bp, Homo sapiens
cagattgctga

SEQ ID NO: 2936 - DNA, 11 bp, Homo sapiens
tccactaccaa

SEQ ID NO: 2937 - DNA, 11 bp, Homo sapiens
tatcctggctc

SEQ ID NO: 2938 - DNA, 11 bp, Homo sapiens
cccagcctgaa

SEQ ID NO: 2939 - DNA, 11 bp, Homo sapiens
tctttttaaaa

SEQ ID NO: 2940 - DNA, 11 bp, Homo sapiens
aggagatggag

SEQ ID NO: 2941 - DNA, 11 bp, Homo sapiens
ctgcagaatat

SEQ ID NO: 2942 - DNA, 11 bp, Homo sapiens
attttccttag

SEQ ID NO: 2943 - DNA, 11 bp, Homo sapiens
tatttattcaa

SEQ ID NO: 2944 - DNA, 11 bp, Homo sapiens
ccgatttttac

SEQ ID NO: 2945 - DNA, 11 bp, Homo sapiens
agcctcggcca

SEQ ID NO: 2946 - DNA, 11 bp, Homo sapiens
ggaccacccaa

SEQ ID NO: 2947 - DNA, 11 bp, Homo sapiens
cgagtgagagg

SEQ ID NO: 2948 - DNA, 11 bp, Homo sapiens
gtgaaccctgt

SEQ ID NO: 2949 - DNA, 11 bp, Homo sapiens
tgtgcatcttg

SEQ ID NO: 2950 - DNA, 11 bp, Homo sapiens
tgtagtatttg

SEQ ID NO: 2951 - DNA, 11 bp, Homo sapiens
tctatctcagg

SEQ ID NO: 2952 - DNA, 11 bp, Homo sapiens
cggggtggccg

SEQ ID NO: 2953 - DNA, 11 bp, Homo sapiens
cagtgtatata

SEQ ID NO: 2954 - DNA, 11 bp, Homo sapiens
actttagatgg

SEQ ID NO: 2955 - DNA, 11 bp, Homo sapiens
gcccaaggacc

SEQ ID NO: 2956 - DNA, 11 bp, Homo sapiens
tgcacgttttc

SEQ ID NO: 2957 - DNA, 11 bp, Homo sapiens
cattataactt

SEQ ID NO: 2958 - DNA, 11 bp, Homo sapiens
gaccctagctc

SEQ ID NO: 2959 - DNA, 11 bp, Homo sapiens
agccactgcac

SEQ ID NO: 2960 - DNA, 11 bp, Homo sapiens
aggggccgggg

SEQ ID NO: 2961 - DNA, 11 bp, Homo sapiens
aggaaggaaca

SEQ ID NO: 2962 - DNA, 11 bp, Homo sapiens
cctaaactcaa

SEQ ID NO: 2963 - DNA, 11 bp, Homo sapiens
tgttccctttg

SEQ ID NO: 2964 - DNA, 11 bp, Homo sapiens
gttcatagtat

SEQ ID NO: 2965 - DNA, 11 bp, Homo sapiens
aactaacaaaa

SEQ ID NO: 2966 - DNA, 11 bp, Homo sapiens
aaggtgcctcc

SEQ ID NO: 2967 - DNA, 11 bp, Homo sapiens
ggggcttctgt

SEQ ID NO: 2968 - DNA, 11 bp, Homo sapiens
gtggtggacac

SEQ ID NO: 2969 - DNA, 11 bp, Homo sapiens
ccgtgactctg

SEQ ID NO: 2970 - DNA, 11 bp, Homo sapiens
tgcagatggtt

SEQ ID NO: 2971 - DNA, 11 bp, Homo sapiens
aaaggaatgag

SEQ ID NO: 2972 - DNA, 11 bp, Homo sapiens
ataataaagct

SEQ ID NO: 2973 - DNA, 11 bp, Homo sapiens
ctgcagaaatt

SEQ ID NO: 2974 - DNA, 11 bp, Homo sapiens
atcgatcgcct

SEQ ID NO: 2975 - DNA, 11 bp, Homo sapiens
ccagtaacccc

SEQ ID NO: 2976 - DNA, 11 bp, Homo sapiens
cacttttctgt

SEQ ID NO: 2977 - DNA, 11 bp, Homo sapiens
gtggcatacac

SEQ ID NO: 2978 - DNA, 11 bp, Homo sapiens
gtcccaggatt

SEQ ID NO: 2979 - DNA, 11 bp, Homo sapiens
atgtcttcgtt

SEQ ID NO: 2980 - DNA, 11 bp, Homo sapiens
aaaaggagatc

SEQ ID NO: 2981 - DNA, 11 bp, Homo sapiens
gcgaccaacat

SEQ ID NO: 2982 - DNA, 11 bp, Homo sapiens
atccgcctgct

SEQ ID NO: 2983 - DNA, 11 bp, Homo sapiens
gtgaaacccat

SEQ ID NO: 2984 - DNA, 11 bp, Homo sapiens
gaccaccttta

SEQ ID NO: 2985 - DNA, 11 bp, Homo sapiens
gagcttacatt

SEQ ID NO: 2986 - DNA, 11 bp, Homo sapiens
gtgagacctca

SEQ ID NO: 2987 - DNA, 11 bp, Homo sapiens
gaaacaaaatg

SEQ ID NO: 2988 - DNA, 11 bp, Homo sapiens
ggtgaagacaa

SEQ ID NO: 2989 - DNA, 11 bp, Homo sapiens
ttgctgtgtga

SEQ ID NO: 2990 - DNA, 11 bp, Homo sapiens
gtctagaatct

SEQ ID NO: 2991 - DNA, 11 bp, Homo sapiens
gcgaaaccctg

SEQ ID NO: 2992 - DNA, 11 bp, Homo sapiens
cttcctgtaca

SEQ ID NO: 2993 - DNA, 11 bp, Homo sapiens
gctatggtttc

SEQ ID NO: 2994 - DNA, 11 bp, Homo sapiens
gtgcagttagc

SEQ ID NO: 2995 - DNA, 11 bp, Homo sapiens
gtgctattatt

SEQ ID NO: 2996 - DNA, 11 bp, Homo sapiens
gaccttaaggc

SEQ ID NO: 2997 - DNA, 11 bp, Homo sapiens
agcagtccaac

SEQ ID NO: 2998 - DNA, 11 bp, Homo sapiens
ccactccaaaa

SEQ ID NO: 2999 - DNA, 11 bp, Homo sapiens
ttgtacaactg

SEQ ID NO: 3000 - DNA, 11 bp, Homo sapiens
tcttttttcag

SEQ ID NO: 3001 - DNA, 11 bp, Homo sapiens
acgccgcccaa

SEQ ID NO: 3002 - DNA, 11 bp, Homo sapiens
tggtttaaaaa

SEQ ID NO: 3003 - DNA, 11 bp, Homo sapiens
taattaaaaaa

SEQ ID NO: 3004 - DNA, 11 bp, Homo sapiens
cttcataacca

SEQ ID NO: 3005 - DNA, 11 bp, Homo sapiens
agaagcaagag

SEQ ID NO: 3006 - DNA, 11 bp, Homo sapiens
tgtggcctcca

SEQ ID NO: 3007 - DNA, 11 bp, Homo sapiens
ggcagaagata

SEQ ID NO: 3008 - DNA, 11 bp, Homo sapiens
agataatctgt

SEQ ID NO: 3009 - DNA, 11 bp, Homo sapiens
cattttggatg

SEQ ID NO: 3010 - DNA, 11 bp, Homo sapiens
gtgaagagtaa

SEQ ID NO: 3011 - DNA, 11 bp, Homo sapiens
atcagtatgtg

SEQ ID NO: 3012 - DNA, 11 bp, Homo sapiens
agaatcccttg

SEQ ID NO: 3013 - DNA, 11 bp, Homo sapiens
gaagaaaaaaa

SEQ ID NO: 3014 - DNA, 11 bp, Homo sapiens
actgatcttga

SEQ ID NO: 3015 - DNA, 11 bp, Homo sapiens
acccttttttt

SEQ ID NO: 3016 - DNA, 11 bp, Homo sapiens
ttgtaaaaaaa

SEQ ID NO: 3017 - DNA, 11 bp, Homo sapiens
ggggaaagcag

SEQ ID NO: 3018 - DNA, 11 bp, Homo sapiens
taactgtcaaa

SEQ ID NO: 3019 - DNA, 11 bp, Homo sapiens
gtggctgatgc

SEQ ID NO: 3020 - DNA, 11 bp, Homo sapiens
aaatttgtatg

SEQ ID NO: 3021 - DNA, 11 bp, Homo sapiens
agccaccaggc

SEQ ID NO: 3022 - DNA, 11 bp, Homo sapiens
aaggacattcg

SEQ ID NO: 3023 - DNA, 11 bp, Homo sapiens
ccatagatttc

SEQ ID NO: 3024 - DNA, 11 bp, Homo sapiens
ttctcaataca

SEQ ID NO: 3025 - DNA, 11 bp, Homo sapiens
gcttgtatgag

SEQ ID NO: 3026 - DNA, 11 bp, Homo sapiens
cctgtcaatgt

SEQ ID NO: 3027 - DNA, 11 bp, Homo sapiens
ggaatttgctt

SEQ ID NO: 3028 - DNA, 11 bp, Homo sapiens
gggctagtggg

SEQ ID NO: 3029 - DNA, 11 bp, Homo sapiens
gtgacgccccg

SEQ ID NO: 3030 - DNA, 11 bp, Homo sapiens
caatgagcatc

SEQ ID NO: 3031 - DNA, 11 bp, Homo sapiens
aatgtacctgg

SEQ ID NO: 3032 - DNA, 11 bp, Homo sapiens
gccctcattaa

SEQ ID NO: 3033 - DNA, 11 bp, Homo sapiens
atacaaatatg

SEQ ID NO: 3034 - DNA, 11 bp, Homo sapiens
ttgcacttaat

SEQ ID NO: 3035 - DNA, 11 bp, Homo sapiens
aaagctgtgtt

SEQ ID NO: 3036 - DNA, 11 bp, Homo sapiens
agaataaatct

SEQ ID NO: 3037 - DNA, 11 bp, Homo sapiens
gaaaactaccc

SEQ ID NO: 3038 - DNA, 11 bp, Homo sapiens
tggcctaataa

SEQ ID NO: 3039 - DNA, 11 bp, Homo sapiens
gtatcaagcag

SEQ ID NO: 3040 - DNA, 11 bp, Homo sapiens
cctgagtgcgt

SEQ ID NO: 3041 - DNA, 11 bp, Homo sapiens
taacactgact

SEQ ID NO: 3042 - DNA, 11 bp, Homo sapiens
taattctttta

SEQ ID NO: 3043 - DNA, 11 bp, Homo sapiens
gctcaaaacct

SEQ ID NO: 3044 - DNA, 11 bp, Homo sapiens
gcacggaaaaa

SEQ ID NO: 3045 - DNA, 11 bp, Homo sapiens
cctctccaaca

SEQ ID NO: 3046 - DNA, 11 bp, Homo sapiens
agggatatggg

SEQ ID NO: 3047 - DNA, 11 bp, Homo sapiens
gatcaaaattt

SEQ ID NO: 3048 - DNA, 11 bp, Homo sapiens
agagggacaac

SEQ ID NO: 3049 - DNA, 11 bp, Homo sapiens
ccatccaggca

SEQ ID NO: 3050 - DNA, 11 bp, Homo sapiens
tgtaacgtggg

SEQ ID NO: 3051 - DNA, 11 bp, Homo sapiens
caccttctgcc

SEQ ID NO: 3052 - DNA, 11 bp, Homo sapiens
ctgtacagaca

SEQ ID NO: 3053 - DNA, 11 bp, Homo sapiens
aaagtttgaga

SEQ ID NO: 3054 - DNA, 11 bp, Homo sapiens
ggcttcctaat

SEQ ID NO: 3055 - DNA, 11 bp, Homo sapiens
cgaggggggcg

SEQ ID NO: 3056 - DNA, 11 bp, Homo sapiens
cccaagctagc

SEQ ID NO: 3057 - DNA, 11 bp, Homo sapiens
catatcattaa

SEQ ID NO: 3058 - DNA, 11 bp, Homo sapiens
ctcggaggcct

SEQ ID NO: 3059 - DNA, 11 bp, Homo sapiens
gtagacttgtc

SEQ ID NO: 3060 - DNA, 11 bp, Homo sapiens
tctgcaagcag

SEQ ID NO: 3061 - DNA, 11 bp, Homo sapiens
acccccccgcc

SEQ ID NO: 3062 - DNA, 11 bp, Homo sapiens
tgcagtgactg

SEQ ID NO: 3063 - DNA, 11 bp, Homo sapiens
tggctcctccc

SEQ ID NO: 3064 - DNA, 11 bp, Homo sapiens
cactgtgttga

SEQ ID NO: 3065 - DNA, 11 bp, Homo sapiens
tatttcaccgt

SEQ ID NO: 3066 - DNA, 11 bp, Homo sapiens
tccaggaaact

SEQ ID NO: 3067 - DNA, 11 bp, Homo sapiens
ctggggggaag

SEQ ID NO: 3068 - DNA, 11 bp, Homo sapiens
gcttttggagg

SEQ ID NO: 3069 - DNA, 11 bp, Homo sapiens
tgccttaaaca

SEQ ID NO: 3070 - DNA, 11 bp, Homo sapiens
aacataggaaa

SEQ ID NO: 3071 - DNA, 11 bp, Homo sapiens
taagagtgctg

SEQ ID NO: 3072 - DNA, 11 bp, Homo sapiens
gctgtagacaa

SEQ ID NO: 3073 - DNA, 11 bp, Homo sapiens
gcgaaacccta

SEQ ID NO: 3074 - DNA, 11 bp, Homo sapiens
gctcagatcgg

SEQ ID NO: 3075 - DNA, 11 bp, Homo sapiens
tggcctctctg

SEQ ID NO: 3076 - DNA, 11 bp, Homo sapiens
ttcttgaacaa

SEQ ID NO: 3077 - DNA, 11 bp, Homo sapiens
gtggcacacgc

SEQ ID NO: 3078 - DNA, 11 bp, Homo sapiens
tgtggcctcct

SEQ ID NO: 3079 - DNA, 11 bp, Homo sapiens
gttgtgatgtt

SEQ ID NO: 3080 - DNA, 11 bp, Homo sapiens
gtagcaggtgc

SEQ ID NO: 3081 - DNA, 11 bp, Homo sapiens
acatcccagaa

SEQ ID NO: 3082 - DNA, 11 bp, Homo sapiens
taattttggaa

SEQ ID NO: 3083 - DNA, 11 bp, Homo sapiens
gaaatttttga

SEQ ID NO: 3084 - DNA, 11 bp, Homo sapiens
ttctttgaata

SEQ ID NO: 3085 - DNA, 11 bp, Homo sapiens
acactaaaatg

SEQ ID NO: 3086 - DNA, 11 bp, Homo sapiens
caacccagatt

SEQ ID NO: 3087 - DNA, 11 bp, Homo sapiens
tctttcgtctg

SEQ ID NO: 3088 - DNA, 11 bp, Homo sapiens
actatctctag

SEQ ID NO: 3089 - DNA, 11 bp, Homo sapiens
tttgcttgcaa

SEQ ID NO: 3090 - DNA, 11 bp, Homo sapiens
ttttgtacgca

SEQ ID NO: 3091 - DNA, 11 bp, Homo sapiens
aaggagattat

SEQ ID NO: 3092 - DNA, 11 bp, Homo sapiens
aggctattgga

SEQ ID NO: 3093 - DNA, 11 bp, Homo sapiens
cataaatatgc

SEQ ID NO: 3094 - DNA, 11 bp, Homo sapiens
tttataactat

SEQ ID NO: 3095 - DNA, 11 bp, Homo sapiens
gaaaataaact

SEQ ID NO: 3096 - DNA, 11 bp, Homo sapiens
taaggcttaac

SEQ ID NO: 3097 - DNA, 11 bp, Homo sapiens
tggttagataa

SEQ ID NO: 3098 - DNA, 11 bp, Homo sapiens
caggctgctgg

SEQ ID NO: 3099 - DNA, 11 bp, Homo sapiens
gcctggagttg

SEQ ID NO: 3100 - DNA, 11 bp, Homo sapiens
acccactttct

SEQ ID NO: 3101 - DNA, 11 bp, Homo sapiens
acgatggccga

SEQ ID NO: 3102 - DNA, 11 bp, Homo sapiens
taaattggata

SEQ ID NO: 3103 - DNA, 11 bp, Homo sapiens
aactgtataca

SEQ ID NO: 3104 - DNA, 11 bp, Homo sapiens
gattctgagtt

SEQ ID NO: 3105 - DNA, 11 bp, Homo sapiens
ttgagtgcagt

SEQ ID NO: 3106 - DNA, 11 bp, Homo sapiens
agttgcagata

SEQ ID NO: 3107 - DNA, 11 bp, Homo sapiens
gcgcaccgctg

SEQ ID NO: 3108 - DNA, 11 bp, Homo sapiens
gcttcacacca

SEQ ID NO: 3109 - DNA, 11 bp, Homo sapiens
gtgggccagga

SEQ ID NO: 3110 - DNA, 11 bp, Homo sapiens
ccagaaaagag

SEQ ID NO: 3111 - DNA, 11 bp, Homo sapiens
cccaactaatt

SEQ ID NO: 3112 - DNA, 11 bp, Homo sapiens
aatccccatcc

SEQ ID NO: 3113 - DNA, 11 bp, Homo sapiens
gtgctcattct

SEQ ID NO: 3114 - DNA, 11 bp, Homo sapiens
ctctgctgtct

SEQ ID NO: 3115 - DNA, 11 bp, Homo sapiens
tctaaataaaa

SEQ ID NO: 3116 - DNA, 11 bp, Homo sapiens
accaactagaa

SEQ ID NO: 3117 - DNA, 11 bp, Homo sapiens
ggaggttgagg

SEQ ID NO: 3118 - DNA, 11 bp, Homo sapiens
gagaagaaatg

SEQ ID NO: 3119 - DNA, 11 bp, Homo sapiens
cctactaaatg

SEQ ID NO: 3120 - DNA, 11 bp, Homo sapiens
agctaccacgc

SEQ ID NO: 3121 - DNA, 11 bp, Homo sapiens
ctaaatcactg

SEQ ID NO: 3122 - DNA, 11 bp, Homo sapiens
tggaaggtaat

SEQ ID NO: 3123 - DNA, 11 bp, Homo sapiens
attgctaaaaa

SEQ ID NO: 3124 - DNA, 11 bp, Homo sapiens
gccaaggggtt

SEQ ID NO: 3125 - DNA, 11 bp, Homo sapiens
ttttttaaaaa

SEQ ID NO: 3126 - DNA, 11 bp, Homo sapiens
gagagatgacg

SEQ ID NO: 3127 - DNA, 11 bp, Homo sapiens
aataagccaat

SEQ ID NO: 3128 - DNA, 11 bp, Homo sapiens
ctgtgctctac

SEQ ID NO: 3129 - DNA, 11 bp, Homo sapiens
gctgccagcac

SEQ ID NO: 3130 - DNA, 11 bp, Homo sapiens
ccaacagtctt

SEQ ID NO: 3131 - DNA, 11 bp, Homo sapiens
cctcctctgct

SEQ ID NO: 3132 - DNA, 11 bp, Homo sapiens
tgaaaccctgt

SEQ ID NO: 3133 - DNA, 11 bp, Homo sapiens
aattgaataat

SEQ ID NO: 3134 - DNA, 11 bp, Homo sapiens
agaaaatgtga

SEQ ID NO: 3135 - DNA, 11 bp, Homo sapiens
ccctctctgta

SEQ ID NO: 3136 - DNA, 11 bp, Homo sapiens
ggattctgact

SEQ ID NO: 3137 - DNA, 11 bp, Homo sapiens
ttctaagtgtg

SEQ ID NO: 3138 - DNA, 11 bp, Homo sapiens
gcattgtttta

SEQ ID NO: 3139 - DNA, 11 bp, Homo sapiens
gagaagactgt

SEQ ID NO: 3140 - DNA, 11 bp, Homo sapiens
ttacaacagca

SEQ ID NO: 3141 - DNA, 11 bp, Homo sapiens
gtagagtagga

SEQ ID NO: 3142 - DNA, 11 bp, Homo sapiens
ctaattttaca

SEQ ID NO: 3143 - DNA, 11 bp, Homo sapiens
ctgagggtggt

SEQ ID NO: 3144 - DNA, 11 bp, Homo sapiens
ccactctggct

SEQ ID NO: 3145 - DNA, 11 bp, Homo sapiens
gtgagcaagac

SEQ ID NO: 3146 - DNA, 11 bp, Homo sapiens
cactgtgtgta

SEQ ID NO: 3147 - DNA, 11 bp, Homo sapiens
tagcaatcaga

SEQ ID NO: 3148 - DNA, 11 bp, Homo sapiens
gatggaatgtt

SEQ ID NO: 3149 - DNA, 11 bp, Homo sapiens
actgggtggaa

SEQ ID NO: 3150 - DNA, 11 bp, Homo sapiens
cacctaattga

SEQ ID NO: 3151 - DNA, 11 bp, Homo sapiens
ttcacagtgca

SEQ ID NO: 3152 - DNA, 11 bp, Homo sapiens
gtggacttttg

SEQ ID NO: 3153 - DNA, 11 bp, Homo sapiens
ccttacctaca

SEQ ID NO: 3154 - DNA, 11 bp, Homo sapiens
cataaccttcc

SEQ ID NO: 3155 - DNA, 11 bp, Homo sapiens
gctaggtattt

SEQ ID NO: 3156 - DNA, 11 bp, Homo sapiens
ttgtaaagtaa

SEQ ID NO: 3157 - DNA, 11 bp, Homo sapiens
cccttgaccct

SEQ ID NO: 3158 - DNA, 11 bp, Homo sapiens
ccactaatgga

SEQ ID NO: 3159 - DNA, 11 bp, Homo sapiens
agctctgctgc

SEQ ID NO: 3160 - DNA, 11 bp, Homo sapiens
tttgcaccttt

SEQ ID NO: 3161 - DNA, 11 bp, Homo sapiens
gctttgatgat

SEQ ID NO: 3162 - DNA, 11 bp, Homo sapiens
tgtggcctgca

SEQ ID NO: 3163 - DNA, 11 bp, Homo sapiens
cggaacaccgt

SEQ ID NO: 3164 - DNA, 11 bp, Homo sapiens
ctaaccagaca

SEQ ID NO: 3165 - DNA, 11 bp, Homo sapiens
cttaatcctga

SEQ ID NO: 3166 - DNA, 11 bp, Homo sapiens
gtcactgcctc

SEQ ID NO: 3167 - DNA, 11 bp, Homo sapiens
agagggtggga

SEQ ID NO: 3168 - DNA, 11 bp, Homo sapiens
ttgtttaattt

SEQ ID NO: 3169 - DNA, 11 bp, Homo sapiens
cttgtaaactg

SEQ ID NO: 3170 - DNA, 11 bp, Homo sapiens
gtcaaaaaaaa

SEQ ID NO: 3171 - DNA, 11 bp, Homo sapiens
ggggtacccct

SEQ ID NO: 3172 - DNA, 11 bp, Homo sapiens
gtggcatttgc

SEQ ID NO: 3173 - DNA, 11 bp, Homo sapiens
attgatcaata

SEQ ID NO: 3174 - DNA, 11 bp, Homo sapiens
tggctaaaaaa

SEQ ID NO: 3175 - DNA, 11 bp, Homo sapiens
tgccagaaatg

SEQ ID NO: 3176 - DNA, 11 bp, Homo sapiens
gctctggttct

SEQ ID NO: 3177 - DNA, 11 bp, Homo sapiens
gctcctttcac

SEQ ID NO: 3178 - DNA, 11 bp, Homo sapiens
ctctgggatag

SEQ ID NO: 3179 - DNA, 11 bp, Homo sapiens
aagaaaggagt

SEQ ID NO: 3180 - DNA, 11 bp, Homo sapiens
atgaaccgcag

SEQ ID NO: 3181 - DNA, 11 bp, Homo sapiens
gttcacattag

SEQ ID NO: 3182 - DNA, 11 bp, Homo sapiens
gatgctttctc

SEQ ID NO: 3183 - DNA, 11 bp, Homo sapiens
atgacctgaag

SEQ ID NO: 3184 - DNA, 11 bp, Homo sapiens
ggaaccaggtc

SEQ ID NO: 3185 - DNA, 11 bp, Homo sapiens
tcctctacctg

SEQ ID NO: 3186 - DNA, 11 bp, Homo sapiens
tgaagagactt

SEQ ID NO: 3187 - DNA, 11 bp, Homo sapiens
gcaccaaaaaa

SEQ ID NO: 3188 - DNA, 11 bp, Homo sapiens
taaccaaatac

SEQ ID NO: 3189 - DNA, 11 bp, Homo sapiens
tattccccacc

SEQ ID NO: 3190 - DNA, 11 bp, Homo sapiens
ttccagctgct

SEQ ID NO: 3191 - DNA, 11 bp, Homo sapiens
gtagactcttt

SEQ ID NO: 3192 - DNA, 11 bp, Homo sapiens
cttcaattctg

SEQ ID NO: 3193 - DNA, 11 bp, Homo sapiens
acagctaacag

SEQ ID NO: 3194 - DNA, 11 bp, Homo sapiens
ctcgcttctcc

SEQ ID NO: 3195 - DNA, 11 bp, Homo sapiens
tcattccactg

SEQ ID NO: 3196 - DNA, 11 bp, Homo sapiens
tactgattact

SEQ ID NO: 3197 - DNA, 11 bp, Homo sapiens
tcaggtactga

SEQ ID NO: 3198 - DNA, 11 bp, Homo sapiens
aaactgtgaat

SEQ ID NO: 3199 - DNA, 11 bp, Homo sapiens
actgactgact

SEQ ID NO: 3200 - DNA, 11 bp, Homo sapiens
tacttgaagga

SEQ ID NO: 3201 - DNA, 11 bp, Homo sapiens
tttaacagaaa

SEQ ID NO: 3202 - DNA, 11 bp, Homo sapiens
tatcaaaacac

SEQ ID NO: 3203 - DNA, 11 bp, Homo sapiens
gttatatccaa

SEQ ID NO: 3204 - DNA, 11 bp, Homo sapiens
atgaactgatt

SEQ ID NO: 3205 - DNA, 11 bp, Homo sapiens
ctgacgggtat

SEQ ID NO: 3206 - DNA, 11 bp, Homo sapiens
gaatatggcta

SEQ ID NO: 3207 - DNA, 11 bp, Homo sapiens
cttgggtccta

SEQ ID NO: 3208 - DNA, 11 bp, Homo sapiens
ggtgggaactc

SEQ ID NO: 3209 - DNA, 11 bp, Homo sapiens
gaatgggctgg

SEQ ID NO: 3210 - DNA, 11 bp, Homo sapiens
cagtttgcatc

SEQ ID NO: 3211 - DNA, 11 bp, Homo sapiens
tagtcattgag

SEQ ID NO: 3212 - DNA, 11 bp, Homo sapiens
acaataataga

SEQ ID NO: 3213 - DNA, 11 bp, Homo sapiens
cctttcctacc

SEQ ID NO: 3214 - DNA, 11 bp, Homo sapiens
ttgagcttatg

SEQ ID NO: 3215 - DNA, 11 bp, Homo sapiens
agccactgcat

SEQ ID NO: 3216 - DNA, 11 bp, Homo sapiens
gagcaaatgtt

SEQ ID NO: 3217 - DNA, 11 bp, Homo sapiens
ttggtatgaag

SEQ ID NO: 3218 - DNA, 11 bp, Homo sapiens
tgtaaaatggg

SEQ ID NO: 3219 - DNA, 11 bp, Homo sapiens
attaataaaaa

SEQ ID NO: 3220 - DNA, 11 bp, Homo sapiens
agaatcatttg

SEQ ID NO: 3221 - DNA, 11 bp, Homo sapiens
gaattccagtt

SEQ ID NO: 3222 - DNA, 11 bp, Homo sapiens
tctccatcact

SEQ ID NO: 3223 - DNA, 11 bp, Homo sapiens
agtatgaggaa

SEQ ID NO: 3224 - DNA, 11 bp, Homo sapiens
gtaagtgccca

SEQ ID NO: 3225 - DNA, 11 bp, Homo sapiens
tgggaaacaag

SEQ ID NO: 3226 - DNA, 11 bp, Homo sapiens
aaaactgcctg

SEQ ID NO: 3227 - DNA, 11 bp, Homo sapiens
ctaaataaagt

SEQ ID NO: 3228 - DNA, 11 bp, Homo sapiens
gccatacagcc

SEQ ID NO: 3229 - DNA, 11 bp, Homo sapiens
gtctgatatct

SEQ ID NO: 3230 - DNA, 11 bp, Homo sapiens
ggcaacaaagc

SEQ ID NO: 3231 - DNA, 11 bp, Homo sapiens
aatgggagttt

SEQ ID NO: 3232 - DNA, 11 bp, Homo sapiens
gaaacccaaaa

SEQ ID NO: 3233 - DNA, 11 bp, Homo sapiens
gaaaaaccctg

SEQ ID NO: 3234 - DNA, 11 bp, Homo sapiens
aggccccttat

SEQ ID NO: 3235 - DNA, 11 bp, Homo sapiens
aataaatttgc

SEQ ID NO: 3236 - DNA, 11 bp, Homo sapiens
tcataccattg

SEQ ID NO: 3237 - DNA, 11 bp, Homo sapiens
ccaaggattgg

SEQ ID NO: 3238 - DNA, 11 bp, Homo sapiens
aaaagatacta

SEQ ID NO: 3239 - DNA, 11 bp, Homo sapiens
gggcccagggg

SEQ ID NO: 3240 - DNA, 11 bp, Homo sapiens
ggcaagcccca

SEQ ID NO: 3241 - DNA, 11 bp, Homo sapiens
gagcctggata

SEQ ID NO: 3242 - DNA, 11 bp, Homo sapiens
gagggttccag

SEQ ID NO: 3243 - DNA, 11 bp, Homo sapiens
tagaccagata

SEQ ID NO: 3244 - DNA, 11 bp, Homo sapiens
ctgccaagttg

SEQ ID NO: 3245 - DNA, 11 bp, Homo sapiens
cctgcccaccc

SEQ ID NO: 3246 - DNA, 11 bp, Homo sapiens
aacacatcagc

SEQ ID NO: 3247 - DNA, 11 bp, Homo sapiens
agctattcctc

SEQ ID NO: 3248 - DNA, 11 bp, Homo sapiens
accagctcccc

SEQ ID NO: 3249 - DNA, 11 bp, Homo sapiens
aagaccgaggg

SEQ ID NO: 3250 - DNA, 11 bp, Homo sapiens
tgtttgtgtgt

SEQ ID NO: 3251 - DNA, 11 bp, Homo sapiens
ggggcttccag

SEQ ID NO: 3252 - DNA, 11 bp, Homo sapiens
atgatctgcct

SEQ ID NO: 3253 - DNA, 11 bp, Homo sapiens
ttgaatttgtt

SEQ ID NO: 3254 - DNA, 11 bp, Homo sapiens
tatttttctag

SEQ ID NO: 3255 - DNA, 11 bp, Homo sapiens
ttatattgcca

SEQ ID NO: 3256 - DNA, 11 bp, Homo sapiens
tagctgtcttt

SEQ ID NO: 3257 - DNA, 11 bp, Homo sapiens
tggcttcccca

SEQ ID NO: 3258 - DNA, 11 bp, Homo sapiens
gttccaacaaa

SEQ ID NO: 3259 - DNA, 11 bp, Homo sapiens
cgaatgtcctt

SEQ ID NO: 3260 - DNA, 11 bp, Homo sapiens
tgtagctgcaa

SEQ ID NO: 3261 - DNA, 11 bp, Homo sapiens
gagcaggagcc

SEQ ID NO: 3262 - DNA, 11 bp, Homo sapiens
aaaccaaaaaa

SEQ ID NO: 3263 - DNA, 11 bp, Homo sapiens
gcttttattca

SEQ ID NO: 3264 - DNA, 11 bp, Homo sapiens
aggaacacaaa

SEQ ID NO: 3265 - DNA, 11 bp, Homo sapiens
tctctttttct

SEQ ID NO: 3266 - DNA, 11 bp, Homo sapiens
ccccagccagt

SEQ ID NO: 3267 - DNA, 11 bp, Homo sapiens
agtcgccttca

SEQ ID NO: 3268 - DNA, 11 bp, Homo sapiens
gagggtcttgt

SEQ ID NO: 3269 - DNA, 11 bp, Homo sapiens
gcggctgacag

SEQ ID NO: 3270 - DNA, 11 bp, Homo sapiens
atgtgtaacga

SEQ ID NO: 3271 - DNA, 11 bp, Homo sapiens
gggtttgtttc

SEQ ID NO: 3272 - DNA, 11 bp, Homo sapiens
gcaacttggag

SEQ ID NO: 3273 - DNA, 11 bp, Homo sapiens
ttgccaacacc

SEQ ID NO: 3274 - DNA, 11 bp, Homo sapiens
aatgtgaaatg

SEQ ID NO: 3275 - DNA, 11 bp, Homo sapiens
ggaatgcctct

SEQ ID NO: 3276 - DNA, 11 bp, Homo sapiens
ttctagtctgc

SEQ ID NO: 3277 - DNA, 11 bp, Homo sapiens
gttataatacg

SEQ ID NO: 3278 - DNA, 11 bp, Homo sapiens
ccaagggtcca

SEQ ID NO: 3279 - DNA, 11 bp, Homo sapiens
ggagtcctagc

SEQ ID NO: 3280 - DNA, 11 bp, Homo sapiens
gaactgaaaaa

SEQ ID NO: 3281 - DNA, 11 bp, Homo sapiens
cttcaagagtt

SEQ ID NO: 3282 - DNA, 11 bp, Homo sapiens
ttctgtccctt

SEQ ID NO: 3283 - DNA, 11 bp, Homo sapiens
cctacagacac

SEQ ID NO: 3284 - DNA, 11 bp, Homo sapiens
cttacatttta

SEQ ID NO: 3285 - DNA, 11 bp, Homo sapiens
ttctgaagaca

SEQ ID NO: 3286 - DNA, 11 bp, Homo sapiens
attcttaaaca

SEQ ID NO: 3287 - DNA, 11 bp, Homo sapiens
tcctgaatgaa

SEQ ID NO: 3288 - DNA, 11 bp, Homo sapiens
tgtgtttattg

SEQ ID NO: 3289 - DNA, 11 bp, Homo sapiens
gcaacgtaata

SEQ ID NO: 3290 - DNA, 11 bp, Homo sapiens
cagtaaaggtt

SEQ ID NO: 3291 - DNA, 11 bp, Homo sapiens
aaatcctcaaa

SEQ ID NO: 3292 - DNA, 11 bp, Homo sapiens
gagcctcacac

SEQ ID NO: 3293 - DNA, 11 bp, Homo sapiens
cctttctttat

SEQ ID NO: 3294 - DNA, 11 bp, Homo sapiens
gaagttctctg

SEQ ID NO: 3295 - DNA, 11 bp, Homo sapiens
agggcacaggg

SEQ ID NO: 3296 - DNA, 11 bp, Homo sapiens
tcaatatcact

SEQ ID NO: 3297 - DNA, 11 bp, Homo sapiens
tttttatttag

SEQ ID NO: 3298 - DNA, 11 bp, Homo sapiens
cacagtatttg

SEQ ID NO: 3299 - DNA, 11 bp, Homo sapiens
tgagagtattt

SEQ ID NO: 3300 - DNA, 11 bp, Homo sapiens
caataaaactg

SEQ ID NO: 3301 - DNA, 11 bp, Homo sapiens
gtggccggcac

SEQ ID NO: 3302 - DNA, 11 bp, Homo sapiens
aggatcgcttg

SEQ ID NO: 3303 - DNA, 11 bp, Homo sapiens
ttccagtaaac

SEQ ID NO: 3304 - DNA, 11 bp, Homo sapiens
ttttccacatc

SEQ ID NO: 3305 - DNA, 11 bp, Homo sapiens
gtgacagagtg

SEQ ID NO: 3306 - DNA, 11 bp, Homo sapiens
tcacactggct

SEQ ID NO: 3307 - DNA, 11 bp, Homo sapiens
ggactgggtcg

SEQ ID NO: 3308 - DNA, 11 bp, Homo sapiens
gtgaaccccat

SEQ ID NO: 3309 - DNA, 11 bp, Homo sapiens
tggctgcatag

SEQ ID NO: 3310 - DNA, 11 bp, Homo sapiens
aactcagctcc

SEQ ID NO: 3311 - DNA, 11 bp, Homo sapiens
gaataaaccat

SEQ ID NO: 3312 - DNA, 11 bp, Homo sapiens
cctgccgccta

SEQ ID NO: 3313 - DNA, 11 bp, Homo sapiens
cacaccattgt

SEQ ID NO: 3314 - DNA, 11 bp, Homo sapiens
gttctgttaaa

SEQ ID NO: 3315 - DNA, 11 bp, Homo sapiens
ttgacaaattg

SEQ ID NO: 3316 - DNA, 11 bp, Homo sapiens
atatactgtac

SEQ ID NO: 3317 - DNA, 11 bp, Homo sapiens
cgccgagcacg

SEQ ID NO: 3318 - DNA, 11 bp, Homo sapiens
acatttttaag

SEQ ID NO: 3319 - DNA, 11 bp, Homo sapiens
gacggtatcac

SEQ ID NO: 3320 - DNA, 11 bp, Homo sapiens
gaaatattgct

SEQ ID NO: 3321 - DNA, 11 bp, Homo sapiens
aaactaccctt

SEQ ID NO: 3322 - DNA, 11 bp, Homo sapiens
cagcagtagcg

SEQ ID NO: 3323 - DNA, 11 bp, Homo sapiens
gtggaataaag

SEQ ID NO: 3324 - DNA, 11 bp, Homo sapiens
aaggtggagga

SEQ ID NO: 3325 - DNA, 11 bp, Homo sapiens
ggtggcactca

SEQ ID NO: 3326 - DNA, 11 bp, Homo sapiens
aatcttgcaaa

SEQ ID NO: 3327 - DNA, 11 bp, Homo sapiens
tcaactgaagt

SEQ ID NO: 3328 - DNA, 11 bp, Homo sapiens
gtggcgcgcac

SEQ ID NO: 3329 - DNA, 11 bp, Homo sapiens
ctcaccgccct

SEQ ID NO: 3330 - DNA, 11 bp, Homo sapiens
agataacacag

SEQ ID NO: 3331 - DNA, 11 bp, Homo sapiens
ccttgtctttt

SEQ ID NO: 3332 - DNA, 11 bp, Homo sapiens
gagtaaaaaaa

SEQ ID NO: 3333 - DNA, 11 bp, Homo sapiens
gcggctttccg

SEQ ID NO: 3334 - DNA, 11 bp, Homo sapiens
gtggtgcgcac

SEQ ID NO: 3335 - DNA, 11 bp, Homo sapiens
aaataaaagct

SEQ ID NO: 3336 - DNA, 11 bp, Homo sapiens
tcaccttaggt

SEQ ID NO: 3337 - DNA, 11 bp, Homo sapiens
cttctagcaaa

SEQ ID NO: 3338 - DNA, 11 bp, Homo sapiens
gcaaatgccgt

SEQ ID NO: 3339 - DNA, 11 bp, Homo sapiens
tgtcctcccca

SEQ ID NO: 3340 - DNA, 11 bp, Homo sapiens
ccgcttctgct

SEQ ID NO: 3341 - DNA, 11 bp, Homo sapiens
taccctggaac

SEQ ID NO: 3342 - DNA, 11 bp, Homo sapiens
gtcggacactg

SEQ ID NO: 3343 - DNA, 11 bp, Homo sapiens
tcctgtaaagg

SEQ ID NO: 3344 - DNA, 11 bp, Homo sapiens
aggatgaccag

SEQ ID NO: 3345 - DNA, 11 bp, Homo sapiens
ttgcaaccaaa

SEQ ID NO: 3346 - DNA, 11 bp, Homo sapiens
tgagggttaga

SEQ ID NO: 3347 - DNA, 11 bp, Homo sapiens
ctccccatcag

SEQ ID NO: 3348 - DNA, 11 bp, Homo sapiens
ctgggatcatc

SEQ ID NO: 3349 - DNA, 11 bp, Homo sapiens
cctaaggctaa

SEQ ID NO: 3350 - DNA, 11 bp, Homo sapiens
gattaaaccag

SEQ ID NO: 3351 - DNA, 11 bp, Homo sapiens
gttgtggttaa

SEQ ID NO: 3352 - DNA, 11 bp, Homo sapiens
gctggcaggcc

SEQ ID NO: 3353 - DNA, 11 bp, Homo sapiens
taggaaagtaa

SEQ ID NO: 3354 - DNA, 11 bp, Homo sapiens
aggccctgctc

SEQ ID NO: 3355 - DNA, 11 bp, Homo sapiens
acagagcacag

SEQ ID NO: 3356 - DNA, 11 bp, Homo sapiens
gcacttcaaac

SEQ ID NO: 3357 - DNA, 11 bp, Homo sapiens
cctgcctcgta

SEQ ID NO: 3358 - DNA, 11 bp, Homo sapiens
agccagccatt

SEQ ID NO: 3359 - DNA, 11 bp, Homo sapiens
ctttatgtgta

SEQ ID NO: 3360 - DNA, 11 bp, Homo sapiens
cattaaagggt

SEQ ID NO: 3361 - DNA, 11 bp, Homo sapiens
gtggcgcgtgt

SEQ ID NO: 3362 - DNA, 11 bp, Homo sapiens
gaataacaacc

SEQ ID NO: 3363 - DNA, 11 bp, Homo sapiens
tttgtgaatat

SEQ ID NO: 3364 - DNA, 11 bp, Homo sapiens
agaaagggaga

SEQ ID NO: 3365 - DNA, 11 bp, Homo sapiens
cttaatggtgt

SEQ ID NO: 3366 - DNA, 11 bp, Homo sapiens
tttgtcatttt

SEQ ID NO: 3367 - DNA, 11 bp, Homo sapiens
aaagaatatga

SEQ ID NO: 3368 - DNA, 11 bp, Homo sapiens
taatgctaaaa

SEQ ID NO: 3369 - DNA, 11 bp, Homo sapiens
aattaattaaa

SEQ ID NO: 3370 - DNA, 11 bp, Homo sapiens
agaagactggt

SEQ ID NO: 3371 - DNA, 11 bp, Homo sapiens
attcaacaatt

SEQ ID NO: 3372 - DNA, 11 bp, Homo sapiens
cttaaagtctg

SEQ ID NO: 3373 - DNA, 11 bp, Homo sapiens
ggcccttgcct

SEQ ID NO: 3374 - DNA, 11 bp, Homo sapiens
ttggagcaaag

SEQ ID NO: 3375 - DNA, 11 bp, Homo sapiens
cagaagagaag

SEQ ID NO: 3376 - DNA, 11 bp, Homo sapiens
gtatttatctt

SEQ ID NO: 3377 - DNA, 11 bp, Homo sapiens
gactctggaaa

SEQ ID NO: 3378 - DNA, 11 bp, Homo sapiens
gggtgggcagt

SEQ ID NO: 3379 - DNA, 11 bp, Homo sapiens
aaatataatga

SEQ ID NO: 3380 - DNA, 11 bp, Homo sapiens
aagcaagttcc

SEQ ID NO: 3381 - DNA, 11 bp, Homo sapiens
ctcacaaaaaa

SEQ ID NO: 3382 - DNA, 11 bp, Homo sapiens
tatataggtcc

SEQ ID NO: 3383 - DNA, 11 bp, Homo sapiens
aaatcaataaa

SEQ ID NO: 3384 - DNA, 11 bp, Homo sapiens
ttttattattt

SEQ ID NO: 3385 - DNA, 11 bp, Homo sapiens
ggccgttgacc

SEQ ID NO: 3386 - DNA, 11 bp, Homo sapiens
tgttaatttat

SEQ ID NO: 3387 - DNA, 11 bp, Homo sapiens
aagctggccca

SEQ ID NO: 3388 - DNA, 11 bp, Homo sapiens
acagctacagt

SEQ ID NO: 3389 - DNA, 11 bp, Homo sapiens
gtgatgcacgc

SEQ ID NO: 3390 - DNA, 11 bp, Homo sapiens
aagttcccatt

SEQ ID NO: 3391 - DNA, 11 bp, Homo sapiens
accagagagca

SEQ ID NO: 3392 - DNA, 11 bp, Homo sapiens
gaagatgaagg

SEQ ID NO: 3393 - DNA, 11 bp, Homo sapiens
taaattcaagc

SEQ ID NO: 3394 - DNA, 11 bp, Homo sapiens
aaatgtaacat

SEQ ID NO: 3395 - DNA, 11 bp, Homo sapiens
aaacagagctg

SEQ ID NO: 3396 - DNA, 11 bp, Homo sapiens
ggagctgtctg

SEQ ID NO: 3397 - DNA, 11 bp, Homo sapiens
acaaagttgtg

SEQ ID NO: 3398 - DNA, 11 bp, Homo sapiens
agtatgcagag

SEQ ID NO: 3399 - DNA, 11 bp, Homo sapiens
gatggatggaa

SEQ ID NO: 3400 - DNA, 11 bp, Homo sapiens
tggtatttcgg

SEQ ID NO: 3401 - DNA, 11 bp, Homo sapiens
tctaaaagaaa

SEQ ID NO: 3402 - DNA, 11 bp, Homo sapiens
ggagaggcccc

SEQ ID NO: 3403 - DNA, 11 bp, Homo sapiens
aaataaaagat

SEQ ID NO: 3404 - DNA, 11 bp, Homo sapiens
aactaaaaaac

SEQ ID NO: 3405 - DNA, 11 bp, Homo sapiens
ggtcaagccag

SEQ ID NO: 3406 - DNA, 11 bp, Homo sapiens
actcagatgcc

SEQ ID NO: 3407 - DNA, 11 bp, Homo sapiens
aagttgtgaag

SEQ ID NO: 3408 - DNA, 11 bp, Homo sapiens
cctgtatttgc

SEQ ID NO: 3409 - DNA, 11 bp, Homo sapiens
ccttcgagatc

SEQ ID NO: 3410 - DNA, 11 bp, Homo sapiens
tggtgttgagg

SEQ ID NO: 3411 - DNA, 11 bp, Homo sapiens
agaaccttcca

SEQ ID NO: 3412 - DNA, 11 bp, Homo sapiens
acctgtatccc

SEQ ID NO: 3413 - DNA, 11 bp, Homo sapiens
gggaggtagca

SEQ ID NO: 3414 - DNA, 11 bp, Homo sapiens
agcagatcagg

SEQ ID NO: 3415 - DNA, 11 bp, Homo sapiens
agtctgatgtt

SEQ ID NO: 3416 - DNA, 11 bp, Homo sapiens
gatacactggc

SEQ ID NO: 3417 - DNA, 11 bp, Homo sapiens
ggcccctccct

SEQ ID NO: 3418 - DNA, 11 bp, Homo sapiens
gccagggccac

SEQ ID NO: 3419 - DNA, 11 bp, Homo sapiens
gcttaatgttt

SEQ ID NO: 3420 - DNA, 11 bp, Homo sapiens
acagtgtgaga

SEQ ID NO: 3421 - DNA, 11 bp, Homo sapiens
ggagaggaagt

SEQ ID NO: 3422 - DNA, 11 bp, Homo sapiens
acaacatagaa

SEQ ID NO: 3423 - DNA, 11 bp, Homo sapiens
ttaaaagtcac

SEQ ID NO: 3424 - DNA, 11 bp, Homo sapiens
gagtttggccc

SEQ ID NO: 3425 - DNA, 11 bp, Homo sapiens
cgacgaggagg

SEQ ID NO: 3426 - DNA, 11 bp, Homo sapiens
gctcactgcag

SEQ ID NO: 3427 - DNA, 11 bp, Homo sapiens
attcctgaccc

SEQ ID NO: 3428 - DNA, 11 bp, Homo sapiens
ccctgatttta

SEQ ID NO: 3429 - DNA, 11 bp, Homo sapiens
ccagagaactt

SEQ ID NO: 3430 - DNA, 11 bp, Homo sapiens
ctatggcttca

SEQ ID NO: 3431 - DNA, 11 bp, Homo sapiens
agttgtcactt

SEQ ID NO: 3432 - DNA, 11 bp, Homo sapiens
tgggggccgat

SEQ ID NO: 3433 - DNA, 11 bp, Homo sapiens
tgcaaaaaaaa

SEQ ID NO: 3434 - DNA, 11 bp, Homo sapiens
tggagatgtga

SEQ ID NO: 3435 - DNA, 11 bp, Homo sapiens
gcggcagttac

SEQ ID NO: 3436 - DNA, 11 bp, Homo sapiens
gccctgtagtt

SEQ ID NO: 3437 - DNA, 11 bp, Homo sapiens
tcacaagccac

SEQ ID NO: 3438 - DNA, 11 bp, Homo sapiens
tatgaaaacat

SEQ ID NO: 3439 - DNA, 11 bp, Homo sapiens
ggagaaacagc

SEQ ID NO: 3440 - DNA, 11 bp, Homo sapiens
ggggcctgagt

SEQ ID NO: 3441 - DNA, 11 bp, Homo sapiens
aggccaggagt

SEQ ID NO: 3442 - DNA, 11 bp, Homo sapiens
aggtcgggaga

SEQ ID NO: 3443 - DNA, 11 bp, Homo sapiens
aaatgcaataa

SEQ ID NO: 3444 - DNA, 11 bp, Homo sapiens
cgcctgtggtc

SEQ ID NO: 3445 - DNA, 11 bp, Homo sapiens
acttttgcccc

SEQ ID NO: 3446 - DNA, 11 bp, Homo sapiens
acctaaccgtc

SEQ ID NO: 3447 - DNA, 11 bp, Homo sapiens
tcagtgtatta

SEQ ID NO: 3448 - DNA, 11 bp, Homo sapiens
cctctgtttct

SEQ ID NO: 3449 - DNA, 11 bp, Homo sapiens
tccgtgtgtca

SEQ ID NO: 3450 - DNA, 11 bp, Homo sapiens
tattaaaatag

SEQ ID NO: 3451 - DNA, 11 bp, Homo sapiens
agggccgactg

SEQ ID NO: 3452 - DNA, 11 bp, Homo sapiens
atgctttcaca

SEQ ID NO: 3453 - DNA, 11 bp, Homo sapiens
taaccttgctg

SEQ ID NO: 3454 - DNA, 11 bp, Homo sapiens
ggaaataaaaa

SEQ ID NO: 3455 - DNA, 11 bp, Homo sapiens
ccttgttagca

SEQ ID NO: 3456 - DNA, 11 bp, Homo sapiens
ctttgtacact

SEQ ID NO: 3457 - DNA, 11 bp, Homo sapiens
aaattacatag

SEQ ID NO: 3458 - DNA, 11 bp, Homo sapiens
aaggccatctt

SEQ ID NO: 3459 - DNA, 11 bp, Homo sapiens
agtgctgaggg

SEQ ID NO: 3460 - DNA, 11 bp, Homo sapiens
gatgggaccat

SEQ ID NO: 3461 - DNA, 11 bp, Homo sapiens
attttgggcaa

SEQ ID NO: 3462 - DNA, 11 bp, Homo sapiens
taatttaaaaa

SEQ ID NO: 3463 - DNA, 11 bp, Homo sapiens
gtgagaagaga

SEQ ID NO: 3464 - DNA, 11 bp, Homo sapiens
ggcaagccccc

SEQ ID NO: 3465 - DNA, 11 bp, Homo sapiens
tgatgtctgcc

SEQ ID NO: 3466 - DNA, 11 bp, Homo sapiens
ttcttgtttgt

SEQ ID NO: 3467 - DNA, 11 bp, Homo sapiens
gaccttgatcg

SEQ ID NO: 3468 - DNA, 11 bp, Homo sapiens
ttgaaattgta

SEQ ID NO: 3469 - DNA, 11 bp, Homo sapiens
tattatttcag

SEQ ID NO: 3470 - DNA, 11 bp, Homo sapiens
gagtaatggat

SEQ ID NO: 3471 - DNA, 11 bp, Homo sapiens
gcaacaaatcc

SEQ ID NO: 3472 - DNA, 11 bp, Homo sapiens
actacagccat

SEQ ID NO: 3473 - DNA, 11 bp, Homo sapiens
cctgatctgta

SEQ ID NO: 3474 - DNA, 11 bp, Homo sapiens
ctaaagtactt

SEQ ID NO: 3475 - DNA, 11 bp, Homo sapiens
ttcaagtgaaa

SEQ ID NO: 3476 - DNA, 11 bp, Homo sapiens
aactggagtct

SEQ ID NO: 3477 - DNA, 11 bp, Homo sapiens
acctgcttaac

SEQ ID NO: 3478 - DNA, 11 bp, Homo sapiens
aaaattgtaac

SEQ ID NO: 3479 - DNA, 11 bp, Homo sapiens
gccggctgtct

SEQ ID NO: 3480 - DNA, 11 bp, Homo sapiens
ccagccaggtg

SEQ ID NO: 3481 - DNA, 11 bp, Homo sapiens
aaactagaaat

SEQ ID NO: 3482 - DNA, 11 bp, Homo sapiens
gggggtcgggg

SEQ ID NO: 3483 - DNA, 11 bp, Homo sapiens
aatgtttaacg

SEQ ID NO: 3484 - DNA, 11 bp, Homo sapiens
tggtgttttgg

SEQ ID NO: 3485 - DNA, 11 bp, Homo sapiens
catcttatgaa

SEQ ID NO: 3486 - DNA, 11 bp, Homo sapiens
agagcacacct

SEQ ID NO: 3487 - DNA, 11 bp, Homo sapiens
aacagggacag

SEQ ID NO: 3488 - DNA, 11 bp, Homo sapiens
ttaaaatacag

SEQ ID NO: 3489 - DNA, 11 bp, Homo sapiens
agggcttggag

SEQ ID NO: 3490 - DNA, 11 bp, Homo sapiens
gcctggaccat

SEQ ID NO: 3491 - DNA, 11 bp, Homo sapiens
tagcagcaacc

SEQ ID NO: 3492 - DNA, 11 bp, Homo sapiens
cctttcacaca

SEQ ID NO: 3493 - DNA, 11 bp, Homo sapiens
cagagacgtgg

SEQ ID NO: 3494 - DNA, 11 bp, Homo sapiens
ttttcaagaag

SEQ ID NO: 3495 - DNA, 11 bp, Homo sapiens
tctacttttgt

SEQ ID NO: 3496 - DNA, 11 bp, Homo sapiens
taacagccagg

SEQ ID NO: 3497 - DNA, 11 bp, Homo sapiens
tcagatctttg

SEQ ID NO: 3498 - DNA, 11 bp, Homo sapiens
caccagcattg

SEQ ID NO: 3499 - DNA, 11 bp, Homo sapiens
gcatacctgca

SEQ ID NO: 3500 - DNA, 11 bp, Homo sapiens
ctgcccccacc

SEQ ID NO: 3501 - DNA, 11 bp, Homo sapiens
gtgcaggctcc

SEQ ID NO: 3502 - DNA, 11 bp, Homo sapiens
tcagtgaacgc

SEQ ID NO: 3503 - DNA, 11 bp, Homo sapiens
gcccctgcgca

SEQ ID NO: 3504 - DNA, 11 bp, Homo sapiens
aagaggcttcg

SEQ ID NO: 3505 - DNA, 11 bp, Homo sapiens
atttagcaagc

SEQ ID NO: 3506 - DNA, 11 bp, Homo sapiens
cactgagccaa

SEQ ID NO: 3507 - DNA, 11 bp, Homo sapiens
ggatgatgtct

SEQ ID NO: 3508 - DNA, 11 bp, Homo sapiens
tgtttcaggat

SEQ ID NO: 3509 - DNA, 11 bp, Homo sapiens
tctgtgctgtc

SEQ ID NO: 3510 - DNA, 11 bp, Homo sapiens
aagaactaaaa

SEQ ID NO: 3511 - DNA, 11 bp, Homo sapiens
ccctgcttcca

SEQ ID NO: 3512 - DNA, 11 bp, Homo sapiens
gctactctttg

SEQ ID NO: 3513 - DNA, 11 bp, Homo sapiens
cattgagctcc

SEQ ID NO: 3514 - DNA, 11 bp, Homo sapiens
gcacttacaaa

SEQ ID NO: 3515 - DNA, 11 bp, Homo sapiens
ttctgctcttg

SEQ ID NO: 3516 - DNA, 11 bp, Homo sapiens
gctgaacgcgt

SEQ ID NO: 3517 - DNA, 11 bp, Homo sapiens
gggaaaccccg

SEQ ID NO: 3518 - DNA, 11 bp, Homo sapiens
ccacttcctct

SEQ ID NO: 3519 - DNA, 11 bp, Homo sapiens
ttcagcgttct

SEQ ID NO: 3520 - DNA, 11 bp, Homo sapiens
agccaaaaaaa

SEQ ID NO: 3521 - DNA, 11 bp, Homo sapiens
atggcctcctc

SEQ ID NO: 3522 - DNA, 11 bp, Homo sapiens
atttcaagatg

SEQ ID NO: 3523 - DNA, 11 bp, Homo sapiens
gtgatggatgg

SEQ ID NO: 3524 - DNA, 11 bp, Homo sapiens
gatttgtgttc

SEQ ID NO: 3525 - DNA, 11 bp, Homo sapiens
ttaaaaaaaaa

SEQ ID NO: 3526 - DNA, 11 bp, Homo sapiens
aagaaaactgt

SEQ ID NO: 3527 - DNA, 11 bp, Homo sapiens
tgatctgcctg

SEQ ID NO: 3528 - DNA, 11 bp, Homo sapiens
tgctgcattga

SEQ ID NO: 3529 - DNA, 11 bp, Homo sapiens
gcagagatggg

SEQ ID NO: 3530 - DNA, 11 bp, Homo sapiens
tttctggaggt

SEQ ID NO: 3531 - DNA, 11 bp, Homo sapiens
gcagaaccatt

SEQ ID NO: 3532 - DNA, 11 bp, Homo sapiens
cctagtaaaaa

SEQ ID NO: 3533 - DNA, 11 bp, Homo sapiens
gcacaatggga

SEQ ID NO: 3534 - DNA, 11 bp, Homo sapiens
cagtccccctc

SEQ ID NO: 3535 - DNA, 11 bp, Homo sapiens
tagactggcac

SEQ ID NO: 3536 - DNA, 11 bp, Homo sapiens
cactcaataaa

SEQ ID NO: 3537 - DNA, 11 bp, Homo sapiens
ttcaggagggg

SEQ ID NO: 3538 - DNA, 11 bp, Homo sapiens
ccagtggctca

SEQ ID NO: 3539 - DNA, 11 bp, Homo sapiens
tgtattttgac

SEQ ID NO: 3540 - DNA, 11 bp, Homo sapiens
ccgatttttaa

SEQ ID NO: 3541 - DNA, 11 bp, Homo sapiens
gaatttgggat

SEQ ID NO: 3542 - DNA, 11 bp, Homo sapiens
aaagtgaaaaa

SEQ ID NO: 3543 - DNA, 11 bp, Homo sapiens
aaagtgggtgg

SEQ ID NO: 3544 - DNA, 11 bp, Homo sapiens
tgactggcaaa

SEQ ID NO: 3545 - DNA, 11 bp, Homo sapiens
ttacagagctt

SEQ ID NO: 3546 - DNA, 11 bp, Homo sapiens
gtaacaaaatg

SEQ ID NO: 3547 - DNA, 11 bp, Homo sapiens
ctacccaacag

SEQ ID NO: 3548 - DNA, 11 bp, Homo sapiens
gaaaccccaga

SEQ ID NO: 3549 - DNA, 11 bp, Homo sapiens
aacaccctttc

SEQ ID NO: 3550 - DNA, 11 bp, Homo sapiens
tataaaagtgg

SEQ ID NO: 3551 - DNA, 11 bp, Homo sapiens
gcacccactgg

SEQ ID NO: 3552 - DNA, 11 bp, Homo sapiens
gaaacctgaaa

SEQ ID NO: 3553 - DNA, 11 bp, Homo sapiens
tgtgggagtag

SEQ ID NO: 3554 - DNA, 11 bp, Homo sapiens
tgctcccttta

SEQ ID NO: 3555 - DNA, 11 bp, Homo sapiens
ctggtcgttgg

SEQ ID NO: 3556 - DNA, 11 bp, Homo sapiens
agattgctgtt

SEQ ID NO: 3557 - DNA, 11 bp, Homo sapiens
gcctggcaccg

SEQ ID NO: 3558 - DNA, 11 bp, Homo sapiens
gatcttttgtc

SEQ ID NO: 3559 - DNA, 11 bp, Homo sapiens
cattttatttc

SEQ ID NO: 3560 - DNA, 11 bp, Homo sapiens
atgtttcttcc

SEQ ID NO: 3561 - DNA, 11 bp, Homo sapiens
cccttgcactc

SEQ ID NO: 3562 - DNA, 11 bp, Homo sapiens
atgagtttctg

SEQ ID NO: 3563 - DNA, 11 bp, Homo sapiens
ttgcccagact

SEQ ID NO: 3564 - DNA, 11 bp, Homo sapiens
gtttatgttcc

SEQ ID NO: 3565 - DNA, 11 bp, Homo sapiens
ctgaactcttc

SEQ ID NO: 3566 - DNA, 11 bp, Homo sapiens
ccatatgatca

SEQ ID NO: 3567 - DNA, 11 bp, Homo sapiens
agaaaaaataa

SEQ ID NO: 3568 - DNA, 11 bp, Homo sapiens
aggtcaatgaa

SEQ ID NO: 3569 - DNA, 11 bp, Homo sapiens
aaacaatacac

SEQ ID NO: 3570 - DNA, 11 bp, Homo sapiens
tacagatcaca

SEQ ID NO: 3571 - DNA, 11 bp, Homo sapiens
ctgtaaaaaaa

SEQ ID NO: 3572 - DNA, 11 bp, Homo sapiens
gtgaagcccta

SEQ ID NO: 3573 - DNA, 11 bp, Homo sapiens
gtttgggatga

SEQ ID NO: 3574 - DNA, 11 bp, Homo sapiens
gcctgtggatg

SEQ ID NO: 3575 - DNA, 11 bp, Homo sapiens
cctctgccggg

SEQ ID NO: 3576 - DNA, 11 bp, Homo sapiens
tacagtaaaac

SEQ ID NO: 3577 - DNA, 11 bp, Homo sapiens
tccattgctgg

SEQ ID NO: 3578 - DNA, 11 bp, Homo sapiens
atcgtgccatt

SEQ ID NO: 3579 - DNA, 11 bp, Homo sapiens
gcgacaaaaag

SEQ ID NO: 3580 - DNA, 11 bp, Homo sapiens
acgtgacacct

SEQ ID NO: 3581 - DNA, 11 bp, Homo sapiens
gaaagtggctg

SEQ ID NO: 3582 - DNA, 11 bp, Homo sapiens
tttgctgaaca

SEQ ID NO: 3583 - DNA, 11 bp, Homo sapiens
ctgcaaaggag

SEQ ID NO: 3584 - DNA, 11 bp, Homo sapiens
atgggcttgat

SEQ ID NO: 3585 - DNA, 11 bp, Homo sapiens
tgtctttgctc

SEQ ID NO: 3586 - DNA, 11 bp, Homo sapiens
agctaccgggc

SEQ ID NO: 3587 - DNA, 11 bp, Homo sapiens
ccaggcacgct

SEQ ID NO: 3588 - DNA, 11 bp, Homo sapiens
tgagcccggcc

SEQ ID NO: 3589 - DNA, 11 bp, Homo sapiens
ctctgtaattt

SEQ ID NO: 3590 - DNA, 11 bp, Homo sapiens
ctcagcctgag

SEQ ID NO: 3591 - DNA, 11 bp, Homo sapiens
aggggggaggg

SEQ ID NO: 3592 - DNA, 11 bp, Homo sapiens
tggcaaaaaaa

SEQ ID NO: 3593 - DNA, 11 bp, Homo sapiens
tgtcaaaaaaa

SEQ ID NO: 3594 - DNA, 11 bp, Homo sapiens
tcagtgaactg

SEQ ID NO: 3595 - DNA, 11 bp, Homo sapiens
gctcaaactac

SEQ ID NO: 3596 - DNA, 11 bp, Homo sapiens
ccctcactcct

SEQ ID NO: 3597 - DNA, 11 bp, Homo sapiens
gggctggacgg

SEQ ID NO: 3598 - DNA, 11 bp, Homo sapiens
cagggcgagat

SEQ ID NO: 3599 - DNA, 11 bp, Homo sapiens
gctatctcagc

SEQ ID NO: 3600 - DNA, 11 bp, Homo sapiens
ggagacagagt

SEQ ID NO: 3601 - DNA, 11 bp, Homo sapiens
cagttggttgt

SEQ ID NO: 3602 - DNA, 11 bp, Homo sapiens
tcagacaaaag

SEQ ID NO: 3603 - DNA, 11 bp, Homo sapiens
ctcattcagct

SEQ ID NO: 3604 - DNA, 11 bp, Homo sapiens
gtgaaaccctt

SEQ ID NO: 3605 - DNA, 11 bp, Homo sapiens
ttctggaccca

SEQ ID NO: 3606 - DNA, 11 bp, Homo sapiens
gcttggatctc

SEQ ID NO: 3607 - DNA, 11 bp, Homo sapiens
ctcaacagcaa

SEQ ID NO: 3608 - DNA, 11 bp, Homo sapiens
gactctgaaaa

SEQ ID NO: 3609 - DNA, 11 bp, Homo sapiens
ttgccggttaa

SEQ ID NO: 3610 - DNA, 11 bp, Homo sapiens
accctgccaaa

SEQ ID NO: 3611 - DNA, 11 bp, Homo sapiens
tacagagggaa

SEQ ID NO: 3612 - DNA, 11 bp, Homo sapiens
gggtggggttg

SEQ ID NO: 3613 - DNA, 11 bp, Homo sapiens
gaaatacagtt

SEQ ID NO: 3614 - DNA, 11 bp, Homo sapiens
caacattcctg

SEQ ID NO: 3615 - DNA, 11 bp, Homo sapiens
tccttgcttct

SEQ ID NO: 3616 - DNA, 11 bp, Homo sapiens
cgaggggccag

SEQ ID NO: 3617 - DNA, 11 bp, Homo sapiens
agaggtggtgt

SEQ ID NO: 3618 - DNA, 11 bp, Homo sapiens
ccacgtccatc

SEQ ID NO: 3619 - DNA, 11 bp, Homo sapiens
gccttgggggc

SEQ ID NO: 3620 - DNA, 11 bp, Homo sapiens
aggagccgggg

SEQ ID NO: 3621 - DNA, 11 bp, Homo sapiens
cggcaaaaaaa

SEQ ID NO: 3622 - DNA, 11 bp, Homo sapiens
ctggactccgc

SEQ ID NO: 3623 - DNA, 11 bp, Homo sapiens
cccgctcttga

SEQ ID NO: 3624 - DNA, 11 bp, Homo sapiens
gtgatatccaa

SEQ ID NO: 3625 - DNA, 11 bp, Homo sapiens
tcagtaaaaat

SEQ ID NO: 3626 - DNA, 11 bp, Homo sapiens
gcagctatgag

SEQ ID NO: 3627 - DNA, 11 bp, Homo sapiens
ctctctgtgga

SEQ ID NO: 3628 - DNA, 11 bp, Homo sapiens
tctcagatgag

SEQ ID NO: 3629 - DNA, 11 bp, Homo sapiens
ctgtagttgcc

SEQ ID NO: 3630 - DNA, 11 bp, Homo sapiens
atttcacattt

SEQ ID NO: 3631 - DNA, 11 bp, Homo sapiens
actatttcaca

SEQ ID NO: 3632 - DNA, 11 bp, Homo sapiens
ttgttgaaagg

SEQ ID NO: 3633 - DNA, 11 bp, Homo sapiens
tgccctgttcc

SEQ ID NO: 3634 - DNA, 11 bp, Homo sapiens
atgattccctg

SEQ ID NO: 3635 - DNA, 11 bp, Homo sapiens
ataattttttg

SEQ ID NO: 3636 - DNA, 11 bp, Homo sapiens
gcccacttcct

SEQ ID NO: 3637 - DNA, 11 bp, Homo sapiens
ggactcatccc

SEQ ID NO: 3638 - DNA, 11 bp, Homo sapiens
ctgccttattt

SEQ ID NO: 3639 - DNA, 11 bp, Homo sapiens
gacagtggaga

SEQ ID NO: 3640 - DNA, 11 bp, Homo sapiens
cagcaataaaa

SEQ ID NO: 3641 - DNA, 11 bp, Homo sapiens
gtggctcaagc

SEQ ID NO: 3642 - DNA, 11 bp, Homo sapiens
accttggattt

SEQ ID NO: 3643 - DNA, 11 bp, Homo sapiens
gggctgctgcc

SEQ ID NO: 3644 - DNA, 11 bp, Homo sapiens
atgtgggctca

SEQ ID NO: 3645 - DNA, 11 bp, Homo sapiens
ggcaccgtggc

SEQ ID NO: 3646 - DNA, 11 bp, Homo sapiens
gagaaacccag

SEQ ID NO: 3647 - DNA, 11 bp, Homo sapiens
attttggccac

SEQ ID NO: 3648 - DNA, 11 bp, Homo sapiens
tgaagatagac

SEQ ID NO: 3649 - DNA, 11 bp, Homo sapiens
agcccttcctc

SEQ ID NO: 3650 - DNA, 11 bp, Homo sapiens
cttctctgttt

SEQ ID NO: 3651 - DNA, 11 bp, Homo sapiens
tttatcccaaa

SEQ ID NO: 3652 - DNA, 11 bp, Homo sapiens
cttgtggtccc

SEQ ID NO: 3653 - DNA, 11 bp, Homo sapiens
tgcaattcctt

SEQ ID NO: 3654 - DNA, 11 bp, Homo sapiens
gatattttttc

SEQ ID NO: 3655 - DNA, 11 bp, Homo sapiens
ctttgtgaaca

SEQ ID NO: 3656 - DNA, 11 bp, Homo sapiens
tagaccccttg

SEQ ID NO: 3657 - DNA, 11 bp, Homo sapiens
agcgtggctct

SEQ ID NO: 3658 - DNA, 11 bp, Homo sapiens
tttgacaatac

SEQ ID NO: 3659 - DNA, 11 bp, Homo sapiens
gtctagtcaat

SEQ ID NO: 3660 - DNA, 11 bp, Homo sapiens
ctggactttat

SEQ ID NO: 3661 - DNA, 11 bp, Homo sapiens
tgtactggcac

SEQ ID NO: 3662 - DNA, 11 bp, Homo sapiens
tgaaaacctga

SEQ ID NO: 3663 - DNA, 11 bp, Homo sapiens
gttatatgccc

SEQ ID NO: 3664 - DNA, 11 bp, Homo sapiens
ttaataaatgt

SEQ ID NO: 3665 - DNA, 11 bp, Homo sapiens
gaccagcggct

SEQ ID NO: 3666 - DNA, 11 bp, Homo sapiens
agccaaataaa

SEQ ID NO: 3667 - DNA, 11 bp, Homo sapiens
ccaacccattt

SEQ ID NO: 3668 - DNA, 11 bp, Homo sapiens
ttggggacggg

SEQ ID NO: 3669 - DNA, 11 bp, Homo sapiens
tattgacaaca

SEQ ID NO: 3670 - DNA, 11 bp, Homo sapiens
cagattagtta

SEQ ID NO: 3671 - DNA, 11 bp, Homo sapiens
aggagtcgaca

SEQ ID NO: 3672 - DNA, 11 bp, Homo sapiens
caaaatcagga

SEQ ID NO: 3673 - DNA, 11 bp, Homo sapiens
ctctaagaagc

SEQ ID NO: 3674 - DNA, 11 bp, Homo sapiens
aaaccagggcc

SEQ ID NO: 3675 - DNA, 11 bp, Homo sapiens
atggcgcagtc

SEQ ID NO: 3676 - DNA, 11 bp, Homo sapiens
ggatttggcct

SEQ ID NO: 3677 - DNA, 11 bp, Homo sapiens
cccccagatga

SEQ ID NO: 3678 - DNA, 11 bp, Homo sapiens
tgaaaaaaaaa

SEQ ID NO: 3679 - DNA, 11 bp, Homo sapiens
aaggtggagtg

SEQ ID NO: 3680 - DNA, 11 bp, Homo sapiens
ttgttggatat

SEQ ID NO: 3681 - DNA, 11 bp, Homo sapiens
aagtttgcctg

SEQ ID NO: 3682 - DNA, 11 bp, Homo sapiens
ccattgcattc

SEQ ID NO: 3683 - DNA, 11 bp, Homo sapiens
tgctgctgctt

SEQ ID NO: 3684 - DNA, 11 bp, Homo sapiens
gaccccaaggc

SEQ ID NO: 3685 - DNA, 11 bp, Homo sapiens
tggttttggca

SEQ ID NO: 3686 - DNA, 11 bp, Homo sapiens
gtgtcggctgt

SEQ ID NO: 3687 - DNA, 11 bp, Homo sapiens
ggctgtaccca

SEQ ID NO: 3688 - DNA, 11 bp, Homo sapiens
gtttttcattg

SEQ ID NO: 3689 - DNA, 11 bp, Homo sapiens
cgaccctctcc

SEQ ID NO: 3690 - DNA, 11 bp, Homo sapiens
gccacgttgtc

SEQ ID NO: 3691 - DNA, 11 bp, Homo sapiens
atgtatgggga

SEQ ID NO: 3692 - DNA, 11 bp, Homo sapiens
tgccaccacgc

SEQ ID NO: 3693 - DNA, 11 bp, Homo sapiens
cgaaaaaaaaa

SEQ ID NO: 3694 - DNA, 11 bp, Homo sapiens
gtcttcaaaga

SEQ ID NO: 3695 - DNA, 11 bp, Homo sapiens
aagtagagcag

SEQ ID NO: 3696 - DNA, 11 bp, Homo sapiens
tagaaaggcag

SEQ ID NO: 3697 - DNA, 11 bp, Homo sapiens
caggccccacc

SEQ ID NO: 3698 - DNA, 11 bp, Homo sapiens
attctgttgta

SEQ ID NO: 3699 - DNA, 11 bp, Homo sapiens
cgctggttcca

SEQ ID NO: 3700 - DNA, 11 bp, Homo sapiens
taccccacctt

SEQ ID NO: 3701 - DNA, 11 bp, Homo sapiens
tgatgttccac

SEQ ID NO: 3702 - DNA, 11 bp, Homo sapiens
gagtctgttcg

SEQ ID NO: 3703 - DNA, 11 bp, Homo sapiens
ttgcggagccc

SEQ ID NO: 3704 - DNA, 11 bp, Homo sapiens
agtctccccta

SEQ ID NO: 3705 - DNA, 11 bp, Homo sapiens
gttgggagtcc

SEQ ID NO: 3706 - DNA, 11 bp, Homo sapiens
ccagaacagac

SEQ ID NO: 3707 - DNA, 11 bp, Homo sapiens
tagggcaatct

SEQ ID NO: 3708 - DNA, 11 bp, Homo sapiens
gacttcacttt

SEQ ID NO: 3709 - DNA, 11 bp, Homo sapiens
gtggaccctgt

SEQ ID NO: 3710 - DNA, 11 bp, Homo sapiens
cacgcaatgct

SEQ ID NO: 3711 - DNA, 11 bp, Homo sapiens
gcctatggtcc

SEQ ID NO: 3712 - DNA, 11 bp, Homo sapiens
tggaactgtaa

SEQ ID NO: 3713 - DNA, 11 bp, Homo sapiens
aaccaaaaaaa

SEQ ID NO: 3714 - DNA, 11 bp, Homo sapiens
ttgtaaatgcg

SEQ ID NO: 3715 - DNA, 11 bp, Homo sapiens
accaggcaagg

SEQ ID NO: 3716 - DNA, 11 bp, Homo sapiens
agtgcccctct

SEQ ID NO: 3717 - DNA, 11 bp, Homo sapiens
tgtggcaaagt

SEQ ID NO: 3718 - DNA, 11 bp, Homo sapiens
taccaggaacc

SEQ ID NO: 3719 - DNA, 11 bp, Homo sapiens
attttttcaag

SEQ ID NO: 3720 - DNA, 11 bp, Homo sapiens
aggcgcttaga

SEQ ID NO: 3721 - DNA, 11 bp, Homo sapiens
gggatggaagg

SEQ ID NO: 3722 - DNA, 11 bp, Homo sapiens
tcaaggccccc

SEQ ID NO: 3723 - DNA, 11 bp, Homo sapiens
agacgcactct

SEQ ID NO: 3724 - DNA, 11 bp, Homo sapiens
ctgaactgtga

SEQ ID NO: 3725 - DNA, 11 bp, Homo sapiens
tctgtaaaaaa

SEQ ID NO: 3726 - DNA, 11 bp, Homo sapiens
aagtcatctat

SEQ ID NO: 3727 - DNA, 11 bp, Homo sapiens
tattttgaata

SEQ ID NO: 3728 - DNA, 11 bp, Homo sapiens
ggatcaagtcc

SEQ ID NO: 3729 - DNA, 11 bp, Homo sapiens
aaactatgcac

SEQ ID NO: 3730 - DNA, 11 bp, Homo sapiens
aagtcctgcac

SEQ ID NO: 3731 - DNA, 11 bp, Homo sapiens
acggtccagga

SEQ ID NO: 3732 - DNA, 11 bp, Homo sapiens
ttttaaaaaaa

SEQ ID NO: 3733 - DNA, 11 bp, Homo sapiens
ggacactcctt

SEQ ID NO: 3734 - DNA, 11 bp, Homo sapiens
gattgcggata

SEQ ID NO: 3735 - DNA, 11 bp, Homo sapiens
gtgttggggtg

SEQ ID NO: 3736 - DNA, 11 bp, Homo sapiens
ttgctaaaggc

SEQ ID NO: 3737 - DNA, 11 bp, Homo sapiens
tatacagattg

SEQ ID NO: 3738 - DNA, 11 bp, Homo sapiens
ctgcagaaaaa

SEQ ID NO: 3739 - DNA, 11 bp, Homo sapiens
cagtgtattcg

SEQ ID NO: 3740 - DNA, 11 bp, Homo sapiens
cagggctcacc

SEQ ID NO: 3741 - DNA, 11 bp, Homo sapiens
gtgggtcagct

SEQ ID NO: 3742 - DNA, 11 bp, Homo sapiens
taatgaatgag

SEQ ID NO: 3743 - DNA, 11 bp, Homo sapiens
aattacttcct

SEQ ID NO: 3744 - DNA, 11 bp, Homo sapiens
gaggggtttgc

SEQ ID NO: 3745 - DNA, 11 bp, Homo sapiens
ccctccatttg

SEQ ID NO: 3746 - DNA, 11 bp, Homo sapiens
cccttcaaaaa

SEQ ID NO: 3747 - DNA, 11 bp, Homo sapiens
ctggtttaaat

SEQ ID NO: 3748 - DNA, 11 bp, Homo sapiens
tttgttttaag

SEQ ID NO: 3749 - DNA, 11 bp, Homo sapiens
gacaatgtatg

SEQ ID NO: 3750 - DNA, 11 bp, Homo sapiens
ccactgccctt

SEQ ID NO: 3751 - DNA, 11 bp, Homo sapiens
atcctctgcgt

SEQ ID NO: 3752 - DNA, 11 bp, Homo sapiens
ggaaattgtct

SEQ ID NO: 3753 - DNA, 11 bp, Homo sapiens
cattcaccata

SEQ ID NO: 3754 - DNA, 11 bp, Homo sapiens
ttcaacaggaa

SEQ ID NO: 3755 - DNA, 11 bp, Homo sapiens
acttctggaac

SEQ ID NO: 3756 - DNA, 11 bp, Homo sapiens
gaaaatgcatc

SEQ ID NO: 3757 - DNA, 11 bp, Homo sapiens
tgaataaaatg

SEQ ID NO: 3758 - DNA, 11 bp, Homo sapiens
gagaaactaga

SEQ ID NO: 3759 - DNA, 11 bp, Homo sapiens
gagtgcaggac

SEQ ID NO: 3760 - DNA, 11 bp, Homo sapiens
gattggacttg

SEQ ID NO: 3761 - DNA, 11 bp, Homo sapiens
tgccctgagag

SEQ ID NO: 3762 - DNA, 11 bp, Homo sapiens
cttttctatgt

SEQ ID NO: 3763 - DNA, 11 bp, Homo sapiens
tgaagtgtata

SEQ ID NO: 3764 - DNA, 11 bp, Homo sapiens
agaccaaagtg

SEQ ID NO: 3765 - DNA, 11 bp, Homo sapiens
aaactcgagca

SEQ ID NO: 3766 - DNA, 11 bp, Homo sapiens
ttacagtctta

SEQ ID NO: 3767 - DNA, 11 bp, Homo sapiens
agcttgcgctc

SEQ ID NO: 3768 - DNA, 11 bp, Homo sapiens
ttaaactctaa

SEQ ID NO: 3769 - DNA, 11 bp, Homo sapiens
ccacctttccc

SEQ ID NO: 3770 - DNA, 11 bp, Homo sapiens
taataaaggtg

SEQ ID NO: 3771 - DNA, 11 bp, Homo sapiens
gtgggttggct

SEQ ID NO: 3772 - DNA, 11 bp, Homo sapiens
cagttacaaag

SEQ ID NO: 3773 - DNA, 11 bp, Homo sapiens
atgtgaagagt

SEQ ID NO: 3774 - DNA, 11 bp, Homo sapiens
tgtatgccgtc

SEQ ID NO: 3775 - DNA, 11 bp, Homo sapiens
tatgaatgctg

SEQ ID NO: 3776 - DNA, 11 bp, Homo sapiens
atatgaatgtg

SEQ ID NO: 3777 - DNA, 11 bp, Homo sapiens
cacttcctcct

SEQ ID NO: 3778 - DNA, 11 bp, Homo sapiens
ttgttatattg

SEQ ID NO: 3779 - DNA, 11 bp, Homo sapiens
gatgtcttgtt

SEQ ID NO: 3780 - DNA, 11 bp, Homo sapiens
gaggaggaggt

SEQ ID NO: 3781 - DNA, 11 bp, Homo sapiens
gagccaacaat

SEQ ID NO: 3782 - DNA, 11 bp, Homo sapiens
tgagatttctt

SEQ ID NO: 3783 - DNA, 11 bp, Homo sapiens
gagctgcatca

SEQ ID NO: 3784 - DNA, 11 bp, Homo sapiens
gtgctctgtac

SEQ ID NO: 3785 - DNA, 11 bp, Homo sapiens
ttcttgtggcg

SEQ ID NO: 3786 - DNA, 11 bp, Homo sapiens
gtgatgtacgg

SEQ ID NO: 3787 - DNA, 11 bp, Homo sapiens
aaagcattttc

SEQ ID NO: 3788 - DNA, 11 bp, Homo sapiens
cggctgcccac

SEQ ID NO: 3789 - DNA, 11 bp, Homo sapiens
accaggccacc

SEQ ID NO: 3790 - DNA, 11 bp, Homo sapiens
ttgcccagcac

SEQ ID NO: 3791 - DNA, 11 bp, Homo sapiens
tgctgaatcag

SEQ ID NO: 3792 - DNA, 11 bp, Homo sapiens
gccttgatctc

SEQ ID NO: 3793 - DNA, 11 bp, Homo sapiens
acaaagggccc

SEQ ID NO: 3794 - DNA, 11 bp, Homo sapiens
cctctgcactc

SEQ ID NO: 3795 - DNA, 11 bp, Homo sapiens
agccactgcgc

SEQ ID NO: 3796 - DNA, 11 bp, Homo sapiens
attatccaggg

SEQ ID NO: 3797 - DNA, 11 bp, Homo sapiens
taccaagaccc

SEQ ID NO: 3798 - DNA, 11 bp, Homo sapiens
ggccgcgttcg

SEQ ID NO: 3799 - DNA, 11 bp, Homo sapiens
atcctccctat

SEQ ID NO: 3800 - DNA, 11 bp, Homo sapiens
gcagctcaaag

SEQ ID NO: 3801 - DNA, 11 bp, Homo sapiens
ctcaagcggct

SEQ ID NO: 3802 - DNA, 11 bp, Homo sapiens
gtccggagtct

SEQ ID NO: 3803 - DNA, 11 bp, Homo sapiens
agccaccacag

SEQ ID NO: 3804 - DNA, 11 bp, Homo sapiens
agccaattaaa

SEQ ID NO: 3805 - DNA, 11 bp, Homo sapiens
gtgtagttgag

SEQ ID NO: 3806 - DNA, 11 bp, Homo sapiens
accccagcaac

SEQ ID NO: 3807 - DNA, 11 bp, Homo sapiens
gcgattaatta

SEQ ID NO: 3808 - DNA, 11 bp, Homo sapiens
tcaaatgcaaa

SEQ ID NO: 3809 - DNA, 11 bp, Homo sapiens
ggcagagaccc

SEQ ID NO: 3810 - DNA, 11 bp, Homo sapiens
cttcaaaaaaa

SEQ ID NO: 3811 - DNA, 11 bp, Homo sapiens
ccgacgtctcc

SEQ ID NO: 3812 - DNA, 11 bp, Homo sapiens
ctgtgtttgtt

SEQ ID NO: 3813 - DNA, 11 bp, Homo sapiens
ggagcttagaa

SEQ ID NO: 3814 - DNA, 11 bp, Homo sapiens
gaagatccagc

SEQ ID NO: 3815 - DNA, 11 bp, Homo sapiens
aggaaaaaaac

SEQ ID NO: 3816 - DNA, 11 bp, Homo sapiens
aaccaaaggaa

SEQ ID NO: 3817 - DNA, 11 bp, Homo sapiens
gagccaagtga

SEQ ID NO: 3818 - DNA, 11 bp, Homo sapiens
tcaaatctttg

SEQ ID NO: 3819 - DNA, 11 bp, Homo sapiens
gcttccagctt

SEQ ID NO: 3820 - DNA, 11 bp, Homo sapiens
aaggacacatc

SEQ ID NO: 3821 - DNA, 11 bp, Homo sapiens
agtagtatgaa

SEQ ID NO: 3822 - DNA, 11 bp, Homo sapiens
ttctctttcaa

SEQ ID NO: 3823 - DNA, 11 bp, Homo sapiens
ctgttcatcta

SEQ ID NO: 3824 - DNA, 11 bp, Homo sapiens
cctggaacccc

SEQ ID NO: 3825 - DNA, 11 bp, Homo sapiens
gctggagagtt

SEQ ID NO: 3826 - DNA, 11 bp, Homo sapiens
ttttagacagc

SEQ ID NO: 3827 - DNA, 11 bp, Homo sapiens
tgttggtaagt

SEQ ID NO: 3828 - DNA, 11 bp, Homo sapiens
atagcctctta

SEQ ID NO: 3829 - DNA, 11 bp, Homo sapiens
ttgggatggga

SEQ ID NO: 3830 - DNA, 11 bp, Homo sapiens
aggtcagggga

SEQ ID NO: 3831 - DNA, 11 bp, Homo sapiens
ttggctgggct

SEQ ID NO: 3832 - DNA, 11 bp, Homo sapiens
tggggagctcg

SEQ ID NO: 3833 - DNA, 11 bp, Homo sapiens
tcatttttttg

SEQ ID NO: 3834 - DNA, 11 bp, Homo sapiens
gggggggggtt

SEQ ID NO: 3835 - DNA, 11 bp, Homo sapiens
catttttatat

SEQ ID NO: 3836 - DNA, 11 bp, Homo sapiens
gctcactgtag

SEQ ID NO: 3837 - DNA, 11 bp, Homo sapiens
ttaaacccacc

SEQ ID NO: 3838 - DNA, 11 bp, Homo sapiens
ttcccaaggcc

SEQ ID NO: 3839 - DNA, 11 bp, Homo sapiens
aggctttagct

SEQ ID NO: 3840 - DNA, 11 bp, Homo sapiens
gtagcgcacac

SEQ ID NO: 3841 - DNA, 11 bp, Homo sapiens
gcgacagtaat

SEQ ID NO: 3842 - DNA, 11 bp, Homo sapiens
aagtgtgtttt

SEQ ID NO: 3843 - DNA, 11 bp, Homo sapiens
ccagtagaagg

SEQ ID NO: 3844 - DNA, 11 bp, Homo sapiens
tttattgcaca

SEQ ID NO: 3845 - DNA, 11 bp, Homo sapiens
gagattgaggc

SEQ ID NO: 3846 - DNA, 11 bp, Homo sapiens
gagcacttcct

SEQ ID NO: 3847 - DNA, 11 bp, Homo sapiens
cccaccggtgc

SEQ ID NO: 3848 - DNA, 11 bp, Homo sapiens
caggagcccct

SEQ ID NO: 3849 - DNA, 11 bp, Homo sapiens
tagcaattgca

SEQ ID NO: 3850 - DNA, 11 bp, Homo sapiens
gatgcagcagc

SEQ ID NO: 3851 - DNA, 11 bp, Homo sapiens
ttggcctttta

SEQ ID NO: 3852 - DNA, 11 bp, Homo sapiens
gggtctgctgt

SEQ ID NO: 3853 - DNA, 11 bp, Homo sapiens
ttgttctgcta

SEQ ID NO: 3854 - DNA, 11 bp, Homo sapiens
ttggtcctctg

SEQ ID NO: 3855 - DNA, 11 bp, Homo sapiens
aggatgtgggc

SEQ ID NO: 3856 - DNA, 11 bp, Homo sapiens
cccttagcttt

SEQ ID NO: 3857 - DNA, 11 bp, Homo sapiens
tttcagtgggt

SEQ ID NO: 3858 - DNA, 11 bp, Homo sapiens
gcccagccctg

SEQ ID NO: 3859 - DNA, 11 bp, Homo sapiens
gtttggagctg

SEQ ID NO: 3860 - DNA, 11 bp, Homo sapiens
aactaaaaaaa

SEQ ID NO: 3861 - DNA, 11 bp, Homo sapiens
gacacctcctg

SEQ ID NO: 3862 - DNA, 11 bp, Homo sapiens
cctccctgatg

SEQ ID NO: 3863 - DNA, 11 bp, Homo sapiens
aggaatggtag

SEQ ID NO: 3864 - DNA, 11 bp, Homo sapiens
tggtccagcgc

SEQ ID NO: 3865 - DNA, 11 bp, Homo sapiens
tgacttattaa

SEQ ID NO: 3866 - DNA, 11 bp, Homo sapiens
tgtgtgtgaca

SEQ ID NO: 3867 - DNA, 11 bp, Homo sapiens
ccaaagagtat

SEQ ID NO: 3868 - DNA, 11 bp, Homo sapiens
tttcttaatgt

SEQ ID NO: 3869 - DNA, 11 bp, Homo sapiens
taaaacaagaa

SEQ ID NO: 3870 - DNA, 11 bp, Homo sapiens
gacaaaaaaaa

SEQ ID NO: 3871 - DNA, 11 bp, Homo sapiens
aggtcaagaga

SEQ ID NO: 3872 - DNA, 11 bp, Homo sapiens
tcaataaagaa

SEQ ID NO: 3873 - DNA, 11 bp, Homo sapiens
tgctggtgtgg

SEQ ID NO: 3874 - DNA, 11 bp, Homo sapiens
ccaatttacaa

SEQ ID NO: 3875 - DNA, 11 bp, Homo sapiens
ctgtagaaatg

SEQ ID NO: 3876 - DNA, 11 bp, Homo sapiens
aatgaataaaa

SEQ ID NO: 3877 - DNA, 11 bp, Homo sapiens
gcgagtctccg

SEQ ID NO: 3878 - DNA, 11 bp, Homo sapiens
gggaagtcacc

SEQ ID NO: 3879 - DNA, 11 bp, Homo sapiens
gtggcacctgc

SEQ ID NO: 3880 - DNA, 11 bp, Homo sapiens
ctgacttgtgt

SEQ ID NO: 3881 - DNA, 11 bp, Homo sapiens
aggctacggaa

SEQ ID NO: 3882 - DNA, 11 bp, Homo sapiens
aagaggtttgc

SEQ ID NO: 3883 - DNA, 11 bp, Homo sapiens
tggctagtgtt

SEQ ID NO: 3884 - DNA, 11 bp, Homo sapiens
ttttgttttgt

SEQ ID NO: 3885 - DNA, 11 bp, Homo sapiens
gggtaatgtga

SEQ ID NO: 3886 - DNA, 11 bp, Homo sapiens
atccggaccct

SEQ ID NO: 3887 - DNA, 11 bp, Homo sapiens
tgcctggaact

SEQ ID NO: 3888 - DNA, 11 bp, Homo sapiens
ggctgcagtct

SEQ ID NO: 3889 - DNA, 11 bp, Homo sapiens
ctctgataact

SEQ ID NO: 3890 - DNA, 11 bp, Homo sapiens
gtgtctcccgc

SEQ ID NO: 3891 - DNA, 11 bp, Homo sapiens
gcgaacccccc

SEQ ID NO: 3892 - DNA, 11 bp, Homo sapiens
tttttcttaaa

SEQ ID NO: 3893 - DNA, 11 bp, Homo sapiens
aagaatcaaaa

SEQ ID NO: 3894 - DNA, 11 bp, Homo sapiens
gtgctgattct

SEQ ID NO: 3895 - DNA, 11 bp, Homo sapiens
aaccaatctgg

SEQ ID NO: 3896 - DNA, 11 bp, Homo sapiens
agggaaaaaaa

SEQ ID NO: 3897 - DNA, 11 bp, Homo sapiens
aatttgcaaca

SEQ ID NO: 3898 - DNA, 11 bp, Homo sapiens
tcaaatgtcag

SEQ ID NO: 3899 - DNA, 11 bp, Homo sapiens
attttgtgcaa

SEQ ID NO: 3900 - DNA, 11 bp, Homo sapiens
ttcttgttttg

SEQ ID NO: 3901 - DNA, 11 bp, Homo sapiens
gccactacccc

SEQ ID NO: 3902 - DNA, 11 bp, Homo sapiens
gagcaaacgga

SEQ ID NO: 3903 - DNA, 11 bp, Homo sapiens
tcatacagttt

SEQ ID NO: 3904 - DNA, 11 bp, Homo sapiens
gagggaaaaag

SEQ ID NO: 3905 - DNA, 11 bp, Homo sapiens
ctgatgaattc

SEQ ID NO: 3906 - DNA, 11 bp, Homo sapiens
aagcgctacct

SEQ ID NO: 3907 - DNA, 11 bp, Homo sapiens
gaaggctttat

SEQ ID NO: 3908 - DNA, 11 bp, Homo sapiens
acttgattcaa

SEQ ID NO: 3909 - DNA, 11 bp, Homo sapiens
cattgtaattc

SEQ ID NO: 3910 - DNA, 11 bp, Homo sapiens
attttgtaacc

SEQ ID NO: 3911 - DNA, 11 bp, Homo sapiens
cattctcctag

SEQ ID NO: 3912 - DNA, 11 bp, Homo sapiens
tcctgctcatt

SEQ ID NO: 3913 - DNA, 11 bp, Homo sapiens
tggcctttttg

SEQ ID NO: 3914 - DNA, 11 bp, Homo sapiens
ttttacatctt

SEQ ID NO: 3915 - DNA, 11 bp, Homo sapiens
ctgtgtaaagg

SEQ ID NO: 3916 - DNA, 11 bp, Homo sapiens
cagggaatgcc

SEQ ID NO: 3917 - DNA, 11 bp, Homo sapiens
gcagagcagtc

SEQ ID NO: 3918 - DNA, 11 bp, Homo sapiens
ttcactaattg

SEQ ID NO: 3919 - DNA, 11 bp, Homo sapiens
ctattccattt

SEQ ID NO: 3920 - DNA, 11 bp, Homo sapiens
tttgtatggga

SEQ ID NO: 3921 - DNA, 11 bp, Homo sapiens
atgtgggtcta

SEQ ID NO: 3922 - DNA, 11 bp, Homo sapiens
gaaactagatc

SEQ ID NO: 3923 - DNA, 11 bp, Homo sapiens
ttgtaacgtgt

SEQ ID NO: 3924 - DNA, 11 bp, Homo sapiens
ctatgcatcag

SEQ ID NO: 3925 - DNA, 11 bp, Homo sapiens
tttgagttctg

SEQ ID NO: 3926 - DNA, 11 bp, Homo sapiens
ctactgcagtc

SEQ ID NO: 3927 - DNA, 11 bp, Homo sapiens
ctcctcagggc

SEQ ID NO: 3928 - DNA, 11 bp, Homo sapiens
gactctggccc

SEQ ID NO: 3929 - DNA, 11 bp, Homo sapiens
taatgggagtc

SEQ ID NO: 3930 - DNA, 11 bp, Homo sapiens
cctgtgatctc

SEQ ID NO: 3931 - DNA, 11 bp, Homo sapiens
attagcagagt

SEQ ID NO: 3932 - DNA, 11 bp, Homo sapiens
gtggtacatac

SEQ ID NO: 3933 - DNA, 11 bp, Homo sapiens
cccatcaataa

SEQ ID NO: 3934 - DNA, 11 bp, Homo sapiens
ctatcagtctc

SEQ ID NO: 3935 - DNA, 11 bp, Homo sapiens
tgttccaaggc

SEQ ID NO: 3936 - DNA, 11 bp, Homo sapiens
attaatgaatc

SEQ ID NO: 3937 - DNA, 11 bp, Homo sapiens
agaggttgatg

SEQ ID NO: 3938 - DNA, 11 bp, Homo sapiens
tcaacatctag

SEQ ID NO: 3939 - DNA, 11 bp, Homo sapiens
aaactagttgc

SEQ ID NO: 3940 - DNA, 11 bp, Homo sapiens
ccagctccttg

SEQ ID NO: 3941 - DNA, 11 bp, Homo sapiens
attctctcagg

SEQ ID NO: 3942 - DNA, 11 bp, Homo sapiens
agaacagacca

SEQ ID NO: 3943 - DNA, 11 bp, Homo sapiens
tagtctggagt

SEQ ID NO: 3944 - DNA, 11 bp, Homo sapiens
tgaaagtcctg

SEQ ID NO: 3945 - DNA, 11 bp, Homo sapiens
ctactgaaaaa

SEQ ID NO: 3946 - DNA, 11 bp, Homo sapiens
aatgtttgtga

SEQ ID NO: 3947 - DNA, 11 bp, Homo sapiens
tttgattctgt

SEQ ID NO: 3948 - DNA, 11 bp, Homo sapiens
tctctaagcca

SEQ ID NO: 3949 - DNA, 11 bp, Homo sapiens
ggagcttgagg

SEQ ID NO: 3950 - DNA, 11 bp, Homo sapiens
tgagtgaattc

SEQ ID NO: 3951 - DNA, 11 bp, Homo sapiens
tgctaattgta

SEQ ID NO: 3952 - DNA, 11 bp, Homo sapiens
tccagcccctg

SEQ ID NO: 3953 - DNA, 11 bp, Homo sapiens
tatttattcct

SEQ ID NO: 3954 - DNA, 11 bp, Homo sapiens
gagaagacttc

SEQ ID NO: 3955 - DNA, 11 bp, Homo sapiens
agtaaaccatc

SEQ ID NO: 3956 - DNA, 11 bp, Homo sapiens
tctttgcaaag

SEQ ID NO: 3957 - DNA, 11 bp, Homo sapiens
acacttcttgg

SEQ ID NO: 3958 - DNA, 11 bp, Homo sapiens
aaaacaaaaaa

SEQ ID NO: 3959 - DNA, 11 bp, Homo sapiens
catcttcacca

SEQ ID NO: 3960 - DNA, 11 bp, Homo sapiens
aggctggatgc

SEQ ID NO: 3961 - DNA, 11 bp, Homo sapiens
ttggccagggt

SEQ ID NO: 3962 - DNA, 11 bp, Homo sapiens
atagacgcaat

SEQ ID NO: 3963 - DNA, 11 bp, Homo sapiens
tatcactctgt

SEQ ID NO: 3964 - DNA, 11 bp, Homo sapiens
caagaggcaaa

SEQ ID NO: 3965 - DNA, 11 bp, Homo sapiens
atgtactctgg

SEQ ID NO: 3966 - DNA, 11 bp, Homo sapiens
gtggtgcgcgc

SEQ ID NO: 3967 - DNA, 11 bp, Homo sapiens
tcctgccccat

SEQ ID NO: 3968 - DNA, 11 bp, Homo sapiens
ttgttattgcc

SEQ ID NO: 3969 - DNA, 11 bp, Homo sapiens
gggccccctgg

SEQ ID NO: 3970 - DNA, 11 bp, Homo sapiens
ttatgtttaat

SEQ ID NO: 3971 - DNA, 11 bp, Homo sapiens
agtaggaggga

SEQ ID NO: 3972 - DNA, 11 bp, Homo sapiens
ttgtatcagaa

SEQ ID NO: 3973 - DNA, 11 bp, Homo sapiens
gtgcagtcctc

SEQ ID NO: 3974 - DNA, 11 bp, Homo sapiens
ttttgctacag

SEQ ID NO: 3975 - DNA, 11 bp, Homo sapiens
tgaaacttttc

SEQ ID NO: 3976 - DNA, 11 bp, Homo sapiens
ctggccgcaag

SEQ ID NO: 3977 - DNA, 11 bp, Homo sapiens
gactctctcag

SEQ ID NO: 3978 - DNA, 11 bp, Homo sapiens
agctgggttgg

SEQ ID NO: 3979 - DNA, 11 bp, Homo sapiens
tcttctaaaaa

SEQ ID NO: 3980 - DNA, 11 bp, Homo sapiens
gtggggtctct

SEQ ID NO: 3981 - DNA, 11 bp, Homo sapiens
aatttgaaaaa

SEQ ID NO: 3982 - DNA, 11 bp, Homo sapiens
agtgcattgta

SEQ ID NO: 3983 - DNA, 11 bp, Homo sapiens
cactgtagtcc

SEQ ID NO: 3984 - DNA, 11 bp, Homo sapiens
ggtaggcaggg

SEQ ID NO: 3985 - DNA, 11 bp, Homo sapiens
gttaaatgact

SEQ ID NO: 3986 - DNA, 11 bp, Homo sapiens
taacttttttc

SEQ ID NO: 3987 - DNA, 11 bp, Homo sapiens
ccagtgacact

SEQ ID NO: 3988 - DNA, 11 bp, Homo sapiens
cagatgcatca

SEQ ID NO: 3989 - DNA, 11 bp, Homo sapiens
ggatgtcctat

SEQ ID NO: 3990 - DNA, 11 bp, Homo sapiens
ttgggcaggaa

SEQ ID NO: 3991 - DNA, 11 bp, Homo sapiens
tggcaaaatga

SEQ ID NO: 3992 - DNA, 11 bp, Homo sapiens
ttttaactttg

SEQ ID NO: 3993 - DNA, 11 bp, Homo sapiens
tgtgaatatgc

SEQ ID NO: 3994 - DNA, 11 bp, Homo sapiens
tgcaaggcttt

SEQ ID NO: 3995 - DNA, 11 bp, Homo sapiens
tgggagctcag

SEQ ID NO: 3996 - DNA, 11 bp, Homo sapiens
ataaagtctat

SEQ ID NO: 3997 - DNA, 11 bp, Homo sapiens
gccactgaacc

SEQ ID NO: 3998 - DNA, 11 bp, Homo sapiens
tatatacacat

SEQ ID NO: 3999 - DNA, 11 bp, Homo sapiens
gtgtgcatctt

SEQ ID NO: 4000 - DNA, 11 bp, Homo sapiens
gcactctatgt

SEQ ID NO: 4001 - DNA, 11 bp, Homo sapiens
ggaaacctttt

SEQ ID NO: 4002 - DNA, 11 bp, Homo sapiens
atgttaacatc

SEQ ID NO: 4003 - DNA, 11 bp, Homo sapiens
tgtttaaaaat

SEQ ID NO: 4004 - DNA, 11 bp, Homo sapiens
catattcacat

SEQ ID NO: 4005 - DNA, 11 bp, Homo sapiens
tggagacttgc

SEQ ID NO: 4006 - DNA, 11 bp, Homo sapiens
tacctaattat

SEQ ID NO: 4007 - DNA, 11 bp, Homo sapiens
cttgtaccaga

SEQ ID NO: 4008 - DNA, 11 bp, Homo sapiens
tataagaaaaa

SEQ ID NO: 4009 - DNA, 11 bp, Homo sapiens
ctactgtaccc

SEQ ID NO: 4010 - DNA, 11 bp, Homo sapiens
atctaccttgg

SEQ ID NO: 4011 - DNA, 11 bp, Homo sapiens
gtgaaactgtt

SEQ ID NO: 4012 - DNA, 11 bp, Homo sapiens
gtagaaaaaag

SEQ ID NO: 4013 - DNA, 11 bp, Homo sapiens
tttgcacacac

SEQ ID NO: 4014 - DNA, 11 bp, Homo sapiens
acaatctgtag

SEQ ID NO: 4015 - DNA, 11 bp, Homo sapiens
gtgctattttg

SEQ ID NO: 4016 - DNA, 11 bp, Homo sapiens
ctgaacgccat

SEQ ID NO: 4017 - DNA, 11 bp, Homo sapiens
gaggtgatggt

SEQ ID NO: 4018 - DNA, 11 bp, Homo sapiens
ggcacagagag

SEQ ID NO: 4019 - DNA, 11 bp, Homo sapiens
tccctgaaaag

SEQ ID NO: 4020 - DNA, 11 bp, Homo sapiens
atctcaactca

SEQ ID NO: 4021 - DNA, 11 bp, Homo sapiens
ggtgtctccag

SEQ ID NO: 4022 - DNA, 11 bp, Homo sapiens
gtgggtgcttt

SEQ ID NO: 4023 - DNA, 11 bp, Homo sapiens
gagccagagcg

SEQ ID NO: 4024 - DNA, 11 bp, Homo sapiens
agggggctgaa

SEQ ID NO: 4025 - DNA, 11 bp, Homo sapiens
gtgaccccaaa

SEQ ID NO: 4026 - DNA, 11 bp, Homo sapiens
ttcagcagcag

SEQ ID NO: 4027 - DNA, 11 bp, Homo sapiens
ttttgaacagc

SEQ ID NO: 4028 - DNA, 11 bp, Homo sapiens
gaacttgaagt

SEQ ID NO: 4029 - DNA, 11 bp, Homo sapiens
gtaagcgctgt

SEQ ID NO: 4030 - DNA, 11 bp, Homo sapiens
agttgactccc

SEQ ID NO: 4031 - DNA, 11 bp, Homo sapiens
gcgtttctcca

SEQ ID NO: 4032 - DNA, 11 bp, Homo sapiens
tgagcttggaa

SEQ ID NO: 4033 - DNA, 11 bp, Homo sapiens
tgtgggaatag

SEQ ID NO: 4034 - DNA, 11 bp, Homo sapiens
aactcacagtt

SEQ ID NO: 4035 - DNA, 11 bp, Homo sapiens
tgcaacataaa

SEQ ID NO: 4036 - DNA, 11 bp, Homo sapiens
acttgaaaaaa

SEQ ID NO: 4037 - DNA, 11 bp, Homo sapiens
ggactgctggg

SEQ ID NO: 4038 - DNA, 11 bp, Homo sapiens
cccagcaggtt

SEQ ID NO: 4039 - DNA, 11 bp, Homo sapiens
caaacttttgg

SEQ ID NO: 4040 - DNA, 11 bp, Homo sapiens
aaaagatccag

SEQ ID NO: 4041 - DNA, 11 bp, Homo sapiens
acattctacaa

SEQ ID NO: 4042 - DNA, 11 bp, Homo sapiens
atttcttgttt

SEQ ID NO: 4043 - DNA, 11 bp, Homo sapiens
cacatttctgt

SEQ ID NO: 4044 - DNA, 11 bp, Homo sapiens
taattgatcat

SEQ ID NO: 4045 - DNA, 11 bp, Homo sapiens
gcacacttgca

SEQ ID NO: 4046 - DNA, 11 bp, Homo sapiens
cgctctaggct

SEQ ID NO: 4047 - DNA, 11 bp, Homo sapiens
gaggagtgcat

SEQ ID NO: 4048 - DNA, 11 bp, Homo sapiens
ttcttggactt

SEQ ID NO: 4049 - DNA, 11 bp, Homo sapiens
agcctgacccc

SEQ ID NO: 4050 - DNA, 11 bp, Homo sapiens
cagagtccctg

SEQ ID NO: 4051 - DNA, 11 bp, Homo sapiens
cttcctcttgc

SEQ ID NO: 4052 - DNA, 11 bp, Homo sapiens
ttgacgctgta

SEQ ID NO: 4053 - DNA, 11 bp, Homo sapiens
gtaataagtgt

SEQ ID NO: 4054 - DNA, 11 bp, Homo sapiens
atgggccctag

SEQ ID NO: 4055 - DNA, 11 bp, Homo sapiens
cccaatggccc

SEQ ID NO: 4056 - DNA, 11 bp, Homo sapiens
ataatgccatt

SEQ ID NO: 4057 - DNA, 11 bp, Homo sapiens
gcttgacaagt

SEQ ID NO: 4058 - DNA, 11 bp, Homo sapiens
gcttaaccgcc

SEQ ID NO: 4059 - DNA, 11 bp, Homo sapiens
tatttactttg

SEQ ID NO: 4060 - DNA, 11 bp, Homo sapiens
acccaggggag

SEQ ID NO: 4061 - DNA, 11 bp, Homo sapiens
tagaaaacttc

SEQ ID NO: 4062 - DNA, 11 bp, Homo sapiens
agagtgaaaaa

SEQ ID NO: 4063 - DNA, 11 bp, Homo sapiens
ccctttactgc

SEQ ID NO: 4064 - DNA, 11 bp, Homo sapiens
ctgacctttta

SEQ ID NO: 4065 - DNA, 11 bp, Homo sapiens
tcatctttgcc

SEQ ID NO: 4066 - DNA, 11 bp, Homo sapiens
ggcccatccct

SEQ ID NO: 4067 - DNA, 11 bp, Homo sapiens
tgaaatacaaa

SEQ ID NO: 4068 - DNA, 11 bp, Homo sapiens
aatccttactc

SEQ ID NO: 4069 - DNA, 11 bp, Homo sapiens
ctgggccattg

SEQ ID NO: 4070 - DNA, 11 bp, Homo sapiens
ctgtaatattc

SEQ ID NO: 4071 - DNA, 11 bp, Homo sapiens
ccacagcctat

SEQ ID NO: 4072 - DNA, 11 bp, Homo sapiens
ggtgagattgt

SEQ ID NO: 4073 - DNA, 11 bp, Homo sapiens
gaatctctccc

SEQ ID NO: 4074 - DNA, 11 bp, Homo sapiens
atggaccaaag

SEQ ID NO: 4075 - DNA, 11 bp, Homo sapiens
aatcttgttaa

SEQ ID NO: 4076 - DNA, 11 bp, Homo sapiens
gcctcttttct

SEQ ID NO: 4077 - DNA, 11 bp, Homo sapiens
aatggccttga

SEQ ID NO: 4078 - DNA, 11 bp, Homo sapiens
ggcattggtca

SEQ ID NO: 4079 - DNA, 11 bp, Homo sapiens
gtcttgtaatc

SEQ ID NO: 4080 - DNA, 11 bp, Homo sapiens
tagatagcaca

SEQ ID NO: 4081 - DNA, 11 bp, Homo sapiens
tctcaaaacaa

SEQ ID NO: 4082 - DNA, 11 bp, Homo sapiens
aagaactctgc

SEQ ID NO: 4083 - DNA, 11 bp, Homo sapiens
agtaatttaaa

SEQ ID NO: 4084 - DNA, 11 bp, Homo sapiens
cattctttctt

SEQ ID NO: 4085 - DNA, 11 bp, Homo sapiens
ggcagcaggac

SEQ ID NO: 4086 - DNA, 11 bp, Homo sapiens
cttgttattca

SEQ ID NO: 4087 - DNA, 11 bp, Homo sapiens
cactctgtttg

SEQ ID NO: 4088 - DNA, 11 bp, Homo sapiens
ttcccccacct

SEQ ID NO: 4089 - DNA, 11 bp, Homo sapiens
cctcagcctct

SEQ ID NO: 4090 - DNA, 11 bp, Homo sapiens
cttttttcatt

SEQ ID NO: 4091 - DNA, 11 bp, Homo sapiens
tctcccacccc

SEQ ID NO: 4092 - DNA, 11 bp, Homo sapiens
cacctgtaagc

SEQ ID NO: 4093 - DNA, 11 bp, Homo sapiens
gcagcggggat

SEQ ID NO: 4094 - DNA, 11 bp, Homo sapiens
gttgtttttgg

SEQ ID NO: 4095 - DNA, 11 bp, Homo sapiens
ccagcctctgt

SEQ ID NO: 4096 - DNA, 11 bp, Homo sapiens
tgtgggagcca

SEQ ID NO: 4097 - DNA, 11 bp, Homo sapiens
cttgtagccct

SEQ ID NO: 4098 - DNA, 11 bp, Homo sapiens
ttccagaagca

SEQ ID NO: 4099 - DNA, 11 bp, Homo sapiens
catccacctgg

SEQ ID NO: 4100 - DNA, 11 bp, Homo sapiens
aaaagaatact

SEQ ID NO: 4101 - DNA, 11 bp, Homo sapiens
tatatctctct

SEQ ID NO: 4102 - DNA, 11 bp, Homo sapiens
ttggcagcaat

SEQ ID NO: 4103 - DNA, 11 bp, Homo sapiens
gtaaaatttga

SEQ ID NO: 4104 - DNA, 11 bp, Homo sapiens
tatataatgtg

SEQ ID NO: 4105 - DNA, 11 bp, Homo sapiens
gaaacccaggg

SEQ ID NO: 4106 - DNA, 11 bp, Homo sapiens
ccacagctctc

SEQ ID NO: 4107 - DNA, 11 bp, Homo sapiens
tttgttcctga

SEQ ID NO: 4108 - DNA, 11 bp, Homo sapiens
gcagaagcacc

SEQ ID NO: 4109 - DNA, 11 bp, Homo sapiens
agtggtgaggg

SEQ ID NO: 4110 - DNA, 11 bp, Homo sapiens
tcagccctggc

SEQ ID NO: 4111 - DNA, 11 bp, Homo sapiens
cctctcatcca

SEQ ID NO: 4112 - DNA, 11 bp, Homo sapiens
gtggtgcgctt

SEQ ID NO: 4113 - DNA, 11 bp, Homo sapiens
caccctgtagt

SEQ ID NO: 4114 - DNA, 11 bp, Homo sapiens
gtgagacctaa

SEQ ID NO: 4115 - DNA, 11 bp, Homo sapiens
actttgtaaaa

SEQ ID NO: 4116 - DNA, 11 bp, Homo sapiens
tgctgggaact

SEQ ID NO: 4117 - DNA, 11 bp, Homo sapiens
cacctatagta

SEQ ID NO: 4118 - DNA, 11 bp, Homo sapiens
gcaggtacgct

SEQ ID NO: 4119 - DNA, 11 bp, Homo sapiens
ccaggggggcc

SEQ ID NO: 4120 - DNA, 11 bp, Homo sapiens
ctggccaacgt

SEQ ID NO: 4121 - DNA, 11 bp, Homo sapiens
cccaaacgcgc

SEQ ID NO: 4122 - DNA, 11 bp, Homo sapiens
cccaacgcgtt

SEQ ID NO: 4123 - DNA, 11 bp, Homo sapiens
cccttttaaaa

SEQ ID NO: 4124 - DNA, 11 bp, Homo sapiens
attgctccaat

SEQ ID NO: 4125 - DNA, 11 bp, Homo sapiens
aaacagtgtct

SEQ ID NO: 4126 - DNA, 11 bp, Homo sapiens
agctaccaccc

SEQ ID NO: 4127 - DNA, 11 bp, Homo sapiens
cccctgcactg

SEQ ID NO: 4128 - DNA, 11 bp, Homo sapiens
atccacaatgg

SEQ ID NO: 4129 - DNA, 11 bp, Homo sapiens
aaacacggcaa

SEQ ID NO: 4130 - DNA, 11 bp, Homo sapiens
ttgcccaaaaa

SEQ ID NO: 4131 - DNA, 11 bp, Homo sapiens
cctgtaatttt

SEQ ID NO: 4132 - DNA, 11 bp, Homo sapiens
tgagaaaacag

SEQ ID NO: 4133 - DNA, 11 bp, Homo sapiens
gggccctgggc

SEQ ID NO: 4134 - DNA, 11 bp, Homo sapiens
cctgaagcctg

SEQ ID NO: 4135 - DNA, 11 bp, Homo sapiens
aatatgcatcc

SEQ ID NO: 4136 - DNA, 11 bp, Homo sapiens
gatcaaagaag

SEQ ID NO: 4137 - DNA, 11 bp, Homo sapiens
tattttggtgc

SEQ ID NO: 4138 - DNA, 11 bp, Homo sapiens
tgttttagttc

SEQ ID NO: 4139 - DNA, 11 bp, Homo sapiens
agttgctctgg

SEQ ID NO: 4140 - DNA, 11 bp, Homo sapiens
agattaacatt

SEQ ID NO: 4141 - DNA, 11 bp, Homo sapiens
cattcattcat

SEQ ID NO: 4142 - DNA, 11 bp, Homo sapiens
ggtgttcaggg

SEQ ID NO: 4143 - DNA, 11 bp, Homo sapiens
cactcaaaata

SEQ ID NO: 4144 - DNA, 11 bp, Homo sapiens
gcctgaggctt

SEQ ID NO: 4145 - DNA, 11 bp, Homo sapiens
tagccgctggg

SEQ ID NO: 4146 - DNA, 11 bp, Homo sapiens
tgcttggccag

SEQ ID NO: 4147 - DNA, 11 bp, Homo sapiens
aatgggaagat

SEQ ID NO: 4148 - DNA, 11 bp, Homo sapiens
caatgtaaaag

SEQ ID NO: 4149 - DNA, 11 bp, Homo sapiens
gccctagagca

SEQ ID NO: 4150 - DNA, 11 bp, Homo sapiens
caaccatttgc

SEQ ID NO: 4151 - DNA, 11 bp, Homo sapiens
gaaggggcaat

SEQ ID NO: 4152 - DNA, 11 bp, Homo sapiens
atgttggaaag

SEQ ID NO: 4153 - DNA, 11 bp, Homo sapiens
caaataggcca

SEQ ID NO: 4154 - DNA, 11 bp, Homo sapiens
gagatgtatct

SEQ ID NO: 4155 - DNA, 11 bp, Homo sapiens
gatgacaaaaa

SEQ ID NO: 4156 - DNA, 11 bp, Homo sapiens
ccccagcagtc

SEQ ID NO: 4157 - DNA, 11 bp, Homo sapiens
ccacacaattc

SEQ ID NO: 4158 - DNA, 11 bp, Homo sapiens
caacattttaa

SEQ ID NO: 4159 - DNA, 11 bp, Homo sapiens
tataaaaagta

SEQ ID NO: 4160 - DNA, 11 bp, Homo sapiens
ggggcagatcc

SEQ ID NO: 4161 - DNA, 11 bp, Homo sapiens
agccactgtcc

SEQ ID NO: 4162 - DNA, 11 bp, Homo sapiens
agctttctcaa

SEQ ID NO: 4163 - DNA, 11 bp, Homo sapiens
tttctttgacc

SEQ ID NO: 4164 - DNA, 11 bp, Homo sapiens
ggccgggaccc

SEQ ID NO: 4165 - DNA, 11 bp, Homo sapiens
agagatactag

SEQ ID NO: 4166 - DNA, 11 bp, Homo sapiens
gaagcttggtc

SEQ ID NO: 4167 - DNA, 11 bp, Homo sapiens
gcatcgctgtt

SEQ ID NO: 4168 - DNA, 11 bp, Homo sapiens
gttaaaacccc

SEQ ID NO: 4169 - DNA, 11 bp, Homo sapiens
aagagatgtgc

SEQ ID NO: 4170 - DNA, 11 bp, Homo sapiens
tctactaaaga

SEQ ID NO: 4171 - DNA, 11 bp, Homo sapiens
gccacgcccag

SEQ ID NO: 4172 - DNA, 11 bp, Homo sapiens
tataaaacaga

SEQ ID NO: 4173 - DNA, 11 bp, Homo sapiens
gacttttctgg

SEQ ID NO: 4174 - DNA, 11 bp, Homo sapiens
aaaaactgtcc

SEQ ID NO: 4175 - DNA, 11 bp, Homo sapiens
atagctttgat

SEQ ID NO: 4176 - DNA, 11 bp, Homo sapiens
gaatactactc

SEQ ID NO: 4177 - DNA, 11 bp, Homo sapiens
cccttctttgt

SEQ ID NO: 4178 - DNA, 11 bp, Homo sapiens
ttctatgatcc

SEQ ID NO: 4179 - DNA, 11 bp, Homo sapiens
gcacactcata

SEQ ID NO: 4180 - DNA, 11 bp, Homo sapiens
gggaccctcag

SEQ ID NO: 4181 - DNA, 11 bp, Homo sapiens
gatcccagttt

SEQ ID NO: 4182 - DNA, 11 bp, Homo sapiens
tccaacagcct

SEQ ID NO: 4183 - DNA, 11 bp, Homo sapiens
aagaaagacta

SEQ ID NO: 4184 - DNA, 11 bp, Homo sapiens
gaagacaaaag

SEQ ID NO: 4185 - DNA, 11 bp, Homo sapiens
ttgcttctcaa

SEQ ID NO: 4186 - DNA, 11 bp, Homo sapiens
tgtatttcttt

SEQ ID NO: 4187 - DNA, 11 bp, Homo sapiens
gaatagctctg

SEQ ID NO: 4188 - DNA, 11 bp, Homo sapiens
tgagcatattt

SEQ ID NO: 4189 - DNA, 11 bp, Homo sapiens
atctaactaga

SEQ ID NO: 4190 - DNA, 11 bp, Homo sapiens
gatcaaaaata

SEQ ID NO: 4191 - DNA, 11 bp, Homo sapiens
ggtgccagagt

SEQ ID NO: 4192 - DNA, 11 bp, Homo sapiens
gggtgggtttt

SEQ ID NO: 4193 - DNA, 11 bp, Homo sapiens
cctttgagatc

SEQ ID NO: 4194 - DNA, 11 bp, Homo sapiens
cctttctctct

SEQ ID NO: 4195 - DNA, 11 bp, Homo sapiens
tggcagctttg

SEQ ID NO: 4196 - DNA, 11 bp, Homo sapiens
tcgactgagaa

SEQ ID NO: 4197 - DNA, 11 bp, Homo sapiens
aatcaggggac

SEQ ID NO: 4198 - DNA, 11 bp, Homo sapiens
tcttagtagag

SEQ ID NO: 4199 - DNA, 11 bp, Homo sapiens
ctcccagaatc

SEQ ID NO: 4200 - DNA, 11 bp, Homo sapiens
tggggatgaaa

SEQ ID NO: 4201 - DNA, 11 bp, Homo sapiens
tccaataaaat

SEQ ID NO: 4202 - DNA, 11 bp, Homo sapiens
ttcctgaataa

SEQ ID NO: 4203 - DNA, 11 bp, Homo sapiens
ctgagactaaa

SEQ ID NO: 4204 - DNA, 11 bp, Homo sapiens
agctataattg

SEQ ID NO: 4205 - DNA, 11 bp, Homo sapiens
aaagccaagac

SEQ ID NO: 4206 - DNA, 11 bp, Homo sapiens
gcttttaggtt

SEQ ID NO: 4207 - DNA, 11 bp, Homo sapiens
cagcactcctt

SEQ ID NO: 4208 - DNA, 11 bp, Homo sapiens
cctccctcggc

SEQ ID NO: 4209 - DNA, 11 bp, Homo sapiens
ccactggagtc

SEQ ID NO: 4210 - DNA, 11 bp, Homo sapiens
atcaccaaagt

SEQ ID NO: 4211 - DNA, 11 bp, Homo sapiens
cctccggtact

SEQ ID NO: 4212 - DNA, 11 bp, Homo sapiens
gattcattgca

SEQ ID NO: 4213 - DNA, 11 bp, Homo sapiens
agtcaagatca

SEQ ID NO: 4214 - DNA, 11 bp, Homo sapiens
taaaaaaagga

SEQ ID NO: 4215 - DNA, 11 bp, Homo sapiens
cattgatacta

SEQ ID NO: 4216 - DNA, 11 bp, Homo sapiens
gagtcccggct

SEQ ID NO: 4217 - DNA, 11 bp, Homo sapiens
aggggaaggcg

SEQ ID NO: 4218 - DNA, 11 bp, Homo sapiens
tgtgattgtaa

SEQ ID NO: 4219 - DNA, 11 bp, Homo sapiens
gtaaccaaaaa

SEQ ID NO: 4220 - DNA, 11 bp, Homo sapiens
acttttcccac

SEQ ID NO: 4221 - DNA, 11 bp, Homo sapiens
caccctgaata

SEQ ID NO: 4222 - DNA, 11 bp, Homo sapiens
gtggttgccct

SEQ ID NO: 4223 - DNA, 11 bp, Homo sapiens
caaagtaatct

SEQ ID NO: 4224 - DNA, 11 bp, Homo sapiens
cttctgtgtgg

SEQ ID NO: 4225 - DNA, 11 bp, Homo sapiens
ctggcaaattt

SEQ ID NO: 4226 - DNA, 11 bp, Homo sapiens
acatttaaaag

SEQ ID NO: 4227 - DNA, 11 bp, Homo sapiens
cacagcctgcc

SEQ ID NO: 4228 - DNA, 11 bp, Homo sapiens
ctccccccccc

SEQ ID NO: 4229 - DNA, 11 bp, Homo sapiens
gtaagactctg

SEQ ID NO: 4230 - DNA, 11 bp, Homo sapiens
atttcttagct

SEQ ID NO: 4231 - DNA, 11 bp, Homo sapiens
tattatggcca

SEQ ID NO: 4232 - DNA, 11 bp, Homo sapiens
ggtcaagtctg

SEQ ID NO: 4233 - DNA, 11 bp, Homo sapiens
tgcaaaaatct

SEQ ID NO: 4234 - DNA, 11 bp, Homo sapiens
atccattttga

SEQ ID NO: 4235 - DNA, 11 bp, Homo sapiens
aagcacctacg

SEQ ID NO: 4236 - DNA, 11 bp, Homo sapiens
ttatgctcttg

SEQ ID NO: 4237 - DNA, 11 bp, Homo sapiens
gtgctcaattt

SEQ ID NO: 4238 - DNA, 11 bp, Homo sapiens
gcgtctcgatg

SEQ ID NO: 4239 - DNA, 11 bp, Homo sapiens
gtaaacgctgt

SEQ ID NO: 4240 - DNA, 11 bp, Homo sapiens
cattctcattg

SEQ ID NO: 4241 - DNA, 11 bp, Homo sapiens
acttgctgtgt

SEQ ID NO: 4242 - DNA, 11 bp, Homo sapiens
tctgtgtctaa

SEQ ID NO: 4243 - DNA, 11 bp, Homo sapiens
taacctaaaac

SEQ ID NO: 4244 - DNA, 11 bp, Homo sapiens
ttggtgtcact

SEQ ID NO: 4245 - DNA, 11 bp, Homo sapiens
cctccatcttc

SEQ ID NO: 4246 - DNA, 11 bp, Homo sapiens
aaaaagagttt

SEQ ID NO: 4247 - DNA, 11 bp, Homo sapiens
tttagtgaaaa

SEQ ID NO: 4248 - DNA, 11 bp, Homo sapiens
tgatctttatg

SEQ ID NO: 4249 - DNA, 11 bp, Homo sapiens
ccctcccagct

SEQ ID NO: 4250 - DNA, 11 bp, Homo sapiens
ttcccagctgc

SEQ ID NO: 4251 - DNA, 11 bp, Homo sapiens
caaaaacagta

SEQ ID NO: 4252 - DNA, 11 bp, Homo sapiens
agagcagggca

SEQ ID NO: 4253 - DNA, 11 bp, Homo sapiens
gtatggtagag

SEQ ID NO: 4254 - DNA, 11 bp, Homo sapiens
tcacccctatg

SEQ ID NO: 4255 - DNA, 11 bp, Homo sapiens
gaagctccaaa

SEQ ID NO: 4256 - DNA, 11 bp, Homo sapiens
tattttaccgt

SEQ ID NO: 4257 - DNA, 11 bp, Homo sapiens
cggtcgggcag

SEQ ID NO: 4258 - DNA, 11 bp, Homo sapiens
aggacatctat

SEQ ID NO: 4259 - DNA, 11 bp, Homo sapiens
tccataaagaa

SEQ ID NO: 4260 - DNA, 11 bp, Homo sapiens
gagtcatcggc

SEQ ID NO: 4261 - DNA, 11 bp, Homo sapiens
gcactttcctt

SEQ ID NO: 4262 - DNA, 11 bp, Homo sapiens
tggctcccctt

SEQ ID NO: 4263 - DNA, 11 bp, Homo sapiens
gggccaggtgg

SEQ ID NO: 4264 - DNA, 11 bp, Homo sapiens
tcctaccctat

SEQ ID NO: 4265 - DNA, 11 bp, Homo sapiens
aggttttgagg

SEQ ID NO: 4266 - DNA, 11 bp, Homo sapiens
agtggagagta

SEQ ID NO: 4267 - DNA, 11 bp, Homo sapiens
taaaagccttt

SEQ ID NO: 4268 - DNA, 11 bp, Homo sapiens
cccaggggaaa

SEQ ID NO: 4269 - DNA, 11 bp, Homo sapiens
gcaagttgcca

SEQ ID NO: 4270 - DNA, 11 bp, Homo sapiens
gttttggtatt

SEQ ID NO: 4271 - DNA, 11 bp, Homo sapiens
gagattctcat

SEQ ID NO: 4272 - DNA, 11 bp, Homo sapiens
aattaggataa

SEQ ID NO: 4273 - DNA, 11 bp, Homo sapiens
tctccagggcc

SEQ ID NO: 4274 - DNA, 11 bp, Homo sapiens
agctgtctctt

SEQ ID NO: 4275 - DNA, 11 bp, Homo sapiens
agatttgggcg

SEQ ID NO: 4276 - DNA, 11 bp, Homo sapiens
ttccctttttc

SEQ ID NO: 4277 - DNA, 11 bp, Homo sapiens
ggagtgcaaat

SEQ ID NO: 4278 - DNA, 11 bp, Homo sapiens
gttgtttttta

SEQ ID NO: 4279 - DNA, 11 bp, Homo sapiens
tatgtcttgga

SEQ ID NO: 4280 - DNA, 11 bp, Homo sapiens
cagtaaacctc

SEQ ID NO: 4281 - DNA, 11 bp, Homo sapiens
tggatgaaaaa

SEQ ID NO: 4282 - DNA, 11 bp, Homo sapiens
gggaaaaaaag

SEQ ID NO: 4283 - DNA, 11 bp, Homo sapiens
attgtggggcc

SEQ ID NO: 4284 - DNA, 11 bp, Homo sapiens
gaagtttctgc

SEQ ID NO: 4285 - DNA, 11 bp, Homo sapiens
gggaagttctt

SEQ ID NO: 4286 - DNA, 11 bp, Homo sapiens
ctacctgacct

SEQ ID NO: 4287 - DNA, 11 bp, Homo sapiens
gaaagggccct

SEQ ID NO: 4288 - DNA, 11 bp, Homo sapiens
accaaagagac

SEQ ID NO: 4289 - DNA, 11 bp, Homo sapiens
aaaggaagatt

SEQ ID NO: 4290 - DNA, 11 bp, Homo sapiens
cttataatctc

SEQ ID NO: 4291 - DNA, 11 bp, Homo sapiens
aagtatcagct

SEQ ID NO: 4292 - DNA, 11 bp, Homo sapiens
gatatggtttg

SEQ ID NO: 4293 - DNA, 11 bp, Homo sapiens
taactctagaa

SEQ ID NO: 4294 - DNA, 11 bp, Homo sapiens
agaagatgccg

SEQ ID NO: 4295 - DNA, 11 bp, Homo sapiens
tttcgcagaaa

SEQ ID NO: 4296 - DNA, 11 bp, Homo sapiens
cttttgtaatg

SEQ ID NO: 4297 - DNA, 11 bp, Homo sapiens
aaatgatcccg

SEQ ID NO: 4298 - DNA, 11 bp, Homo sapiens
ttcaaagttga

SEQ ID NO: 4299 - DNA, 11 bp, Homo sapiens
taattgtttat

SEQ ID NO: 4300 - DNA, 11 bp, Homo sapiens
ggcaagttcct

SEQ ID NO: 4301 - DNA, 11 bp, Homo sapiens
ggagatagtgc

SEQ ID NO: 4302 - DNA, 11 bp, Homo sapiens
ttctgctttcg

SEQ ID NO: 4303 - DNA, 11 bp, Homo sapiens
tcacgccggac

SEQ ID NO: 4304 - DNA, 11 bp, Homo sapiens
ttccctttatt

SEQ ID NO: 4305 - DNA, 11 bp, Homo sapiens
aatatgtacac

SEQ ID NO: 4306 - DNA, 11 bp, Homo sapiens
caagaacaatc

SEQ ID NO: 4307 - DNA, 11 bp, Homo sapiens
ggcagctggta

SEQ ID NO: 4308 - DNA, 11 bp, Homo sapiens
agggatattgg

SEQ ID NO: 4309 - DNA, 11 bp, Homo sapiens
acactgtactc

SEQ ID NO: 4310 - DNA, 11 bp, Homo sapiens
gaagcagaaaa

SEQ ID NO: 4311 - DNA, 11 bp, Homo sapiens
gagcaaacttt

SEQ ID NO: 4312 - DNA, 11 bp, Homo sapiens
gactggaagta

SEQ ID NO: 4313 - DNA, 11 bp, Homo sapiens
aggctgaggaa

SEQ ID NO: 4314 - DNA, 11 bp, Homo sapiens
tggaaactcag

SEQ ID NO: 4315 - DNA, 11 bp, Homo sapiens
acagattttgg

SEQ ID NO: 4316 - DNA, 11 bp, Homo sapiens
attctttaaaa

SEQ ID NO: 4317 - DNA, 11 bp, Homo sapiens
ctagtgcacac

SEQ ID NO: 4318 - DNA, 11 bp, Homo sapiens
ggcaacaaggt

SEQ ID NO: 4319 - DNA, 11 bp, Homo sapiens
taaaccttttg

SEQ ID NO: 4320 - DNA, 11 bp, Homo sapiens
ttgaaatttga

SEQ ID NO: 4321 - DNA, 11 bp, Homo sapiens
gtctgtgctat

SEQ ID NO: 4322 - DNA, 11 bp, Homo sapiens
tttcttggtaa

SEQ ID NO: 4323 - DNA, 11 bp, Homo sapiens
aaaaatgcttc

SEQ ID NO: 4324 - DNA, 11 bp, Homo sapiens
ctaaattcgga

SEQ ID NO: 4325 - DNA, 11 bp, Homo sapiens
ccagctagaaa

SEQ ID NO: 4326 - DNA, 11 bp, Homo sapiens
gagcagctcac

SEQ ID NO: 4327 - DNA, 11 bp, Homo sapiens
tagagtgatgg

SEQ ID NO: 4328 - DNA, 11 bp, Homo sapiens
tacccagactt

SEQ ID NO: 4329 - DNA, 11 bp, Homo sapiens
ccacctgaatt

SEQ ID NO: 4330 - DNA, 11 bp, Homo sapiens
gggctggtgga

SEQ ID NO: 4331 - DNA, 11 bp, Homo sapiens
tcacgagctat

SEQ ID NO: 4332 - DNA, 11 bp, Homo sapiens
ccctttgagca

SEQ ID NO: 4333 - DNA, 11 bp, Homo sapiens
gaatttactta

SEQ ID NO: 4334 - DNA, 11 bp, Homo sapiens
tcagggtgaag

SEQ ID NO: 4335 - DNA, 11 bp, Homo sapiens
ggactttcaaa

SEQ ID NO: 4336 - DNA, 11 bp, Homo sapiens
agagaagatgc

SEQ ID NO: 4337 - DNA, 11 bp, Homo sapiens
tactcccctga

SEQ ID NO: 4338 - DNA, 11 bp, Homo sapiens
tgacctactgg

SEQ ID NO: 4339 - DNA, 11 bp, Homo sapiens
agtgtaagttt

SEQ ID NO: 4340 - DNA, 11 bp, Homo sapiens
caccgtgtgtc

SEQ ID NO: 4341 - DNA, 11 bp, Homo sapiens
taactcctccc

SEQ ID NO: 4342 - DNA, 11 bp, Homo sapiens
gggtaaggagg

SEQ ID NO: 4343 - DNA, 11 bp, Homo sapiens
aatttatataa

SEQ ID NO: 4344 - DNA, 11 bp, Homo sapiens
tgtaatgtaaa

SEQ ID NO: 4345 - DNA, 11 bp, Homo sapiens
tgggtgaaaaa

SEQ ID NO: 4346 - DNA, 11 bp, Homo sapiens
ttgtctacaaa

SEQ ID NO: 4347 - DNA, 11 bp, Homo sapiens
aacttggatat

SEQ ID NO: 4348 - DNA, 11 bp, Homo sapiens
ttaactttttt

SEQ ID NO: 4349 - DNA, 11 bp, Homo sapiens
tttcttaggtt

SEQ ID NO: 4350 - DNA, 11 bp, Homo sapiens
cctcccccatt

SEQ ID NO: 4351 - DNA, 11 bp, Homo sapiens
ttgttgctggt

SEQ ID NO: 4352 - DNA, 11 bp, Homo sapiens
gtgctgttagt

SEQ ID NO: 4353 - DNA, 11 bp, Homo sapiens
atgacattgga

SEQ ID NO: 4354 - DNA, 11 bp, Homo sapiens
attggtagaca

SEQ ID NO: 4355 - DNA, 11 bp, Homo sapiens
tttatcttttt

SEQ ID NO: 4356 - DNA, 11 bp, Homo sapiens
ttgtcaaaaaa

SEQ ID NO: 4357 - DNA, 11 bp, Homo sapiens
tatattataga

SEQ ID NO: 4358 - DNA, 11 bp, Homo sapiens
ggaattgttgt

SEQ ID NO: 4359 - DNA, 11 bp, Homo sapiens
agcctttgcca

SEQ ID NO: 4360 - DNA, 11 bp, Homo sapiens
tctttattttc

SEQ ID NO: 4361 - DNA, 11 bp, Homo sapiens
tttcctataaa

SEQ ID NO: 4362 - DNA, 11 bp, Homo sapiens
tctaaagaatt

SEQ ID NO: 4363 - DNA, 11 bp, Homo sapiens
tcagcggactg

SEQ ID NO: 4364 - DNA, 11 bp, Homo sapiens
acaatgtagga

SEQ ID NO: 4365 - DNA, 11 bp, Homo sapiens
tgacttggcca

SEQ ID NO: 4366 - DNA, 11 bp, Homo sapiens
ctccccaaaaa

SEQ ID NO: 4367 - DNA, 11 bp, Homo sapiens
ctccctctttc

SEQ ID NO: 4368 - DNA, 11 bp, Homo sapiens
gaagcccaatt

SEQ ID NO: 4369 - DNA, 11 bp, Homo sapiens
ctctaggtaaa

SEQ ID NO: 4370 - DNA, 11 bp, Homo sapiens
gtgatatgact

SEQ ID NO: 4371 - DNA, 11 bp, Homo sapiens
gagagaaatgg

SEQ ID NO: 4372 - DNA, 11 bp, Homo sapiens
cacatttttaa

SEQ ID NO: 4373 - DNA, 11 bp, Homo sapiens
gttttctctgt

SEQ ID NO: 4374 - DNA, 11 bp, Homo sapiens
ttcataagttt

SEQ ID NO: 4375 - DNA, 11 bp, Homo sapiens
agacggtccaa

SEQ ID NO: 4376 - DNA, 11 bp, Homo sapiens
taccccaggaa

SEQ ID NO: 4377 - DNA, 11 bp, Homo sapiens
ttgctcctcct

SEQ ID NO: 4378 - DNA, 11 bp, Homo sapiens
caggggaggac

SEQ ID NO: 4379 - DNA, 11 bp, Homo sapiens
aatatgcggca

SEQ ID NO: 4380 - DNA, 11 bp, Homo sapiens
agtttgagata

SEQ ID NO: 4381 - DNA, 11 bp, Homo sapiens
aatctggcgta

SEQ ID NO: 4382 - DNA, 11 bp, Homo sapiens
gtcaggagaag

SEQ ID NO: 4383 - DNA, 11 bp, Homo sapiens
tctttattttt

SEQ ID NO: 4384 - DNA, 11 bp, Homo sapiens
gcctgcaggaa

SEQ ID NO: 4385 - DNA, 11 bp, Homo sapiens
ttgattcctat

SEQ ID NO: 4386 - DNA, 11 bp, Homo sapiens
tttagagtgga

SEQ ID NO: 4387 - DNA, 11 bp, Homo sapiens
tgtctggttta

SEQ ID NO: 4388 - DNA, 11 bp, Homo sapiens
ttcattcattc

SEQ ID NO: 4389 - DNA, 11 bp, Homo sapiens
ggagggctgtg

SEQ ID NO: 4390 - DNA, 11 bp, Homo sapiens
cttcctgctac

SEQ ID NO: 4391 - DNA, 11 bp, Homo sapiens
tctaagcttgt

SEQ ID NO: 4392 - DNA, 11 bp, Homo sapiens
tgagaattctg

SEQ ID NO: 4393 - DNA, 11 bp, Homo sapiens
gtgcctcagcc

SEQ ID NO: 4394 - DNA, 11 bp, Homo sapiens
ccccaaggcct

SEQ ID NO: 4395 - DNA, 11 bp, Homo sapiens
agggaggctga

SEQ ID NO: 4396 - DNA, 11 bp, Homo sapiens
tttgtctgtct

SEQ ID NO: 4397 - DNA, 11 bp, Homo sapiens
cacagccacta

SEQ ID NO: 4398 - DNA, 11 bp, Homo sapiens
gatgctagagc

SEQ ID NO: 4399 - DNA, 11 bp, Homo sapiens
atcttcagtat

SEQ ID NO: 4400 - DNA, 11 bp, Homo sapiens
gtctccaagcc

SEQ ID NO: 4401 - DNA, 11 bp, Homo sapiens
catttcccttg

SEQ ID NO: 4402 - DNA, 11 bp, Homo sapiens
ataaaaggaaa

SEQ ID NO: 4403 - DNA, 11 bp, Homo sapiens
atgaagtgttg

SEQ ID NO: 4404 - DNA, 11 bp, Homo sapiens
tgttactggga

SEQ ID NO: 4405 - DNA, 11 bp, Homo sapiens
ccacagggatt

SEQ ID NO: 4406 - DNA, 11 bp, Homo sapiens
ttcctggtgcg

SEQ ID NO: 4407 - DNA, 11 bp, Homo sapiens
ctagtttaaaa

SEQ ID NO: 4408 - DNA, 11 bp, Homo sapiens
attaagtacaa

SEQ ID NO: 4409 - DNA, 11 bp, Homo sapiens
cacttgtttct

SEQ ID NO: 4410 - DNA, 11 bp, Homo sapiens
ccccgtggtca

SEQ ID NO: 4411 - DNA, 11 bp, Homo sapiens
ctataatccca

SEQ ID NO: 4412 - DNA, 11 bp, Homo sapiens
gctaaactccg

SEQ ID NO: 4413 - DNA, 11 bp, Homo sapiens
gggtcttggag

SEQ ID NO: 4414 - DNA, 11 bp, Homo sapiens
gtggctttcgc

SEQ ID NO: 4415 - DNA, 11 bp, Homo sapiens
tttattgtaga

SEQ ID NO: 4416 - DNA, 11 bp, Homo sapiens
tggacagtgaa

SEQ ID NO: 4417 - DNA, 11 bp, Homo sapiens
taacctagatg

SEQ ID NO: 4418 - DNA, 11 bp, Homo sapiens
actgcctgcat

SEQ ID NO: 4419 - DNA, 11 bp, Homo sapiens
gataaaccaga

SEQ ID NO: 4420 - DNA, 11 bp, Homo sapiens
ttttacaaacc

SEQ ID NO: 4421 - DNA, 11 bp, Homo sapiens
tgtattgtaaa

SEQ ID NO: 4422 - DNA, 11 bp, Homo sapiens
aagggatgctg

SEQ ID NO: 4423 - DNA, 11 bp, Homo sapiens
ggtaaaaaatg

SEQ ID NO: 4424 - DNA, 11 bp, Homo sapiens
aaagcccaagt

SEQ ID NO: 4425 - DNA, 11 bp, Homo sapiens
cagggtgtgtg

SEQ ID NO: 4426 - DNA, 11 bp, Homo sapiens
tttggcttggc

SEQ ID NO: 4427 - DNA, 11 bp, Homo sapiens
aaacagtaaat

SEQ ID NO: 4428 - DNA, 11 bp, Homo sapiens
cctcatttccc

SEQ ID NO: 4429 - DNA, 11 bp, Homo sapiens
ttgttgatcca

SEQ ID NO: 4430 - DNA, 11 bp, Homo sapiens
tttgaaaacaa

SEQ ID NO: 4431 - DNA, 11 bp, Homo sapiens
aaccttccata

SEQ ID NO: 4432 - DNA, 11 bp, Homo sapiens
aggagcaccgt

SEQ ID NO: 4433 - DNA, 11 bp, Homo sapiens
agctccgggac

SEQ ID NO: 4434 - DNA, 11 bp, Homo sapiens
atgtttaccag

SEQ ID NO: 4435 - DNA, 11 bp, Homo sapiens
atacgtttttt

SEQ ID NO: 4436 - DNA, 11 bp, Homo sapiens
atgacatcact

SEQ ID NO: 4437 - DNA, 11 bp, Homo sapiens
cccctgccctg

SEQ ID NO: 4438 - DNA, 11 bp, Homo sapiens
atgtagtcatt

SEQ ID NO: 4439 - DNA, 11 bp, Homo sapiens
tttctgccttc

SEQ ID NO: 4440 - DNA, 11 bp, Homo sapiens
caaatgtccat

SEQ ID NO: 4441 - DNA, 11 bp, Homo sapiens
gcggtgtacac

SEQ ID NO: 4442 - DNA, 11 bp, Homo sapiens
tacaaaaaaaa

SEQ ID NO: 4443 - DNA, 11 bp, Homo sapiens
ggacaaaaaag

SEQ ID NO: 4444 - DNA, 11 bp, Homo sapiens
cgaaggctgta

SEQ ID NO: 4445 - DNA, 11 bp, Homo sapiens
attgtaagttt

SEQ ID NO: 4446 - DNA, 11 bp, Homo sapiens
gccacactgtc

SEQ ID NO: 4447 - DNA, 11 bp, Homo sapiens
cttcaaggccg

SEQ ID NO: 4448 - DNA, 11 bp, Homo sapiens
ccacacctctc

SEQ ID NO: 4449 - DNA, 11 bp, Homo sapiens
gacatctcttc

SEQ ID NO: 4450 - DNA, 11 bp, Homo sapiens
cctggccctta

SEQ ID NO: 4451 - DNA, 11 bp, Homo sapiens
aagggccacaa

SEQ ID NO: 4452 - DNA, 11 bp, Homo sapiens
tttattttaat

SEQ ID NO: 4453 - DNA, 11 bp, Homo sapiens
gtttctcaaat

SEQ ID NO: 4454 - DNA, 11 bp, Homo sapiens
aaattgcttag

SEQ ID NO: 4455 - DNA, 11 bp, Homo sapiens
gaaaaagatgt

SEQ ID NO: 4456 - DNA, 11 bp, Homo sapiens
tttcaaataaa

SEQ ID NO: 4457 - DNA, 11 bp, Homo sapiens
tggggaatagg

SEQ ID NO: 4458 - DNA, 11 bp, Homo sapiens
gtgcaagctgt

SEQ ID NO: 4459 - DNA, 11 bp, Homo sapiens
cctggggtaag

SEQ ID NO: 4460 - DNA, 11 bp, Homo sapiens
tgtgagcctca

SEQ ID NO: 4461 - DNA, 11 bp, Homo sapiens
gagttggcact

SEQ ID NO: 4462 - DNA, 11 bp, Homo sapiens
gactggaactt

SEQ ID NO: 4463 - DNA, 11 bp, Homo sapiens
gcggcaagcat

SEQ ID NO: 4464 - DNA, 11 bp, Homo sapiens
tggatcaccaa

SEQ ID NO: 4465 - DNA, 11 bp, Homo sapiens
ggaggggttca

SEQ ID NO: 4466 - DNA, 11 bp, Homo sapiens
ccttatggaaa

SEQ ID NO: 4467 - DNA, 11 bp, Homo sapiens
gtggcagtggc

SEQ ID NO: 4468 - DNA, 11 bp, Homo sapiens
tgtccgtcaca

SEQ ID NO: 4469 - DNA, 11 bp, Homo sapiens
aaatggccaac

SEQ ID NO: 4470 - DNA, 11 bp, Homo sapiens
tactgtttgat

SEQ ID NO: 4471 - DNA, 11 bp, Homo sapiens
cgtaagacgtt

SEQ ID NO: 4472 - DNA, 11 bp, Homo sapiens
ggctttcagca

SEQ ID NO: 4473 - DNA, 11 bp, Homo sapiens
taaccccaaat

SEQ ID NO: 4474 - DNA, 11 bp, Homo sapiens
gtcaaaatttc

SEQ ID NO: 4475 - DNA, 11 bp, Homo sapiens
cttttgttctg

SEQ ID NO: 4476 - DNA, 11 bp, Homo sapiens
ctattctaaaa

SEQ ID NO: 4477 - DNA, 11 bp, Homo sapiens
gtgtcctcctc

SEQ ID NO: 4478 - DNA, 11 bp, Homo sapiens
ttggcttttct

SEQ ID NO: 4479 - DNA, 11 bp, Homo sapiens
aagggggcaag

SEQ ID NO: 4480 - DNA, 11 bp, Homo sapiens
gtggctcatac

SEQ ID NO: 4481 - DNA, 11 bp, Homo sapiens
gtaacaagctc

SEQ ID NO: 4482 - DNA, 11 bp, Homo sapiens
gactcagggat

SEQ ID NO: 4483 - DNA, 11 bp, Homo sapiens
agggacataaa

SEQ ID NO: 4484 - DNA, 11 bp, Homo sapiens
cctgtgtgtgt

SEQ ID NO: 4485 - DNA, 11 bp, Homo sapiens
ggctggtcacc

SEQ ID NO: 4486 - DNA, 11 bp, Homo sapiens
gacatttttcc

SEQ ID NO: 4487 - DNA, 11 bp, Homo sapiens
gggaggaggtt

SEQ ID NO: 4488 - DNA, 11 bp, Homo sapiens
ttttgtgcatt

SEQ ID NO: 4489 - DNA, 11 bp, Homo sapiens
tgcaataggga

SEQ ID NO: 4490 - DNA, 11 bp, Homo sapiens
tggtagcagta

SEQ ID NO: 4491 - DNA, 11 bp, Homo sapiens
ggcttggggag

SEQ ID NO: 4492 - DNA, 11 bp, Homo sapiens
actccaaaaaa

SEQ ID NO: 4493 - DNA, 11 bp, Homo sapiens
tggggagagga

SEQ ID NO: 4494 - DNA, 11 bp, Homo sapiens
tgcttgacaag

SEQ ID NO: 4495 - DNA, 11 bp, Homo sapiens
taggatggggg

SEQ ID NO: 4496 - DNA, 11 bp, Homo sapiens
taggttgtcta

SEQ ID NO: 4497 - DNA, 11 bp, Homo sapiens
taaactgaaaa

SEQ ID NO: 4498 - DNA, 11 bp, Homo sapiens
aaaacattatg

SEQ ID NO: 4499 - DNA, 11 bp, Homo sapiens
aatgtccagta

SEQ ID NO: 4500 - DNA, 11 bp, Homo sapiens
gtgaaactgca

SEQ ID NO: 4501 - DNA, 11 bp, Homo sapiens
gcacagattac

SEQ ID NO: 4502 - DNA, 11 bp, Homo sapiens
gcacctgtcgc

SEQ ID NO: 4503 - DNA, 11 bp, Homo sapiens
ctggtgagtgc

SEQ ID NO: 4504 - DNA, 11 bp, Homo sapiens
atgatgatgat

SEQ ID NO: 4505 - DNA, 11 bp, Homo sapiens
ggagcgtgggg

SEQ ID NO: 4506 - DNA, 11 bp, Homo sapiens
ctcccccaaaa

SEQ ID NO: 4507 - DNA, 11 bp, Homo sapiens
aaaacctgtaa

SEQ ID NO: 4508 - DNA, 11 bp, Homo sapiens
tggcagtctgc

SEQ ID NO: 4509 - DNA, 11 bp, Homo sapiens
ttgtgagaata

SEQ ID NO: 4510 - DNA, 11 bp, Homo sapiens
aaggcgtttcc

SEQ ID NO: 4511 - DNA, 11 bp, Homo sapiens
atactgtcagt

SEQ ID NO: 4512 - DNA, 11 bp, Homo sapiens
cctatttactg

SEQ ID NO: 4513 - DNA, 11 bp, Homo sapiens
gtactgtagca

SEQ ID NO: 4514 - DNA, 11 bp, Homo sapiens
ttctttctcac

SEQ ID NO: 4515 - DNA, 11 bp, Homo sapiens
ctcagagaaca

SEQ ID NO: 4516 - DNA, 11 bp, Homo sapiens
aagcatctcag

SEQ ID NO: 4517 - DNA, 11 bp, Homo sapiens
tagatctgtat

SEQ ID NO: 4518 - DNA, 11 bp, Homo sapiens
tactttataag

SEQ ID NO: 4519 - DNA, 11 bp, Homo sapiens
cacaaatgctg

SEQ ID NO: 4520 - DNA, 11 bp, Homo sapiens
ctgtgtccaag

SEQ ID NO: 4521 - DNA, 11 bp, Homo sapiens
aagaactacac

SEQ ID NO: 4522 - DNA, 11 bp, Homo sapiens
gcaaggaaaaa

SEQ ID NO: 4523 - DNA, 11 bp, Homo sapiens
aaatgcagtag

SEQ ID NO: 4524 - DNA, 11 bp, Homo sapiens
gaaattcaaac

SEQ ID NO: 4525 - DNA, 11 bp, Homo sapiens
atgcctttgaa

SEQ ID NO: 4526 - DNA, 11 bp, Homo sapiens
ttccgttcctt

SEQ ID NO: 4527 - DNA, 11 bp, Homo sapiens
tcggtgtctgg

SEQ ID NO: 4528 - DNA, 11 bp, Homo sapiens
gtggctcaatt

SEQ ID NO: 4529 - DNA, 11 bp, Homo sapiens
ggttggtggtc

SEQ ID NO: 4530 - DNA, 11 bp, Homo sapiens
ggaggtgctca

SEQ ID NO: 4531 - DNA, 11 bp, Homo sapiens
ggcctgggggt

SEQ ID NO: 4532 - DNA, 11 bp, Homo sapiens
tttgttgtatg

SEQ ID NO: 4533 - DNA, 11 bp, Homo sapiens
gcatcttcaaa

SEQ ID NO: 4534 - DNA, 11 bp, Homo sapiens
gagaagccccg

SEQ ID NO: 4535 - DNA, 11 bp, Homo sapiens
acaggcagaaa

SEQ ID NO: 4536 - DNA, 11 bp, Homo sapiens
gcgttcaataa

SEQ ID NO: 4537 - DNA, 11 bp, Homo sapiens
aagcacttctg

SEQ ID NO: 4538 - DNA, 11 bp, Homo sapiens
cagtcccggct

SEQ ID NO: 4539 - DNA, 11 bp, Homo sapiens
tatatacattt

SEQ ID NO: 4540 - DNA, 11 bp, Homo sapiens
tgactgtcacg

SEQ ID NO: 4541 - DNA, 11 bp, Homo sapiens
ggcagattgct

SEQ ID NO: 4542 - DNA, 11 bp, Homo sapiens
ttctcgagatg

SEQ ID NO: 4543 - DNA, 11 bp, Homo sapiens
ggaccattgaa

SEQ ID NO: 4544 - DNA, 11 bp, Homo sapiens
cctttctgtaa

SEQ ID NO: 4545 - DNA, 11 bp, Homo sapiens
tggaaatcaag

SEQ ID NO: 4546 - DNA, 11 bp, Homo sapiens
aagccagtctg

SEQ ID NO: 4547 - DNA, 11 bp, Homo sapiens
acttttcaaaa

SEQ ID NO: 4548 - DNA, 11 bp, Homo sapiens
tatgtatttct

SEQ ID NO: 4549 - DNA, 11 bp, Homo sapiens
gtgctattctg

SEQ ID NO: 4550 - DNA, 11 bp, Homo sapiens
tctgtcctcag

SEQ ID NO: 4551 - DNA, 11 bp, Homo sapiens
gggtgtggtgg

SEQ ID NO: 4552 - DNA, 11 bp, Homo sapiens
gcccccaataa

SEQ ID NO: 4553 - DNA, 11 bp, Homo sapiens
aaatatgagct

SEQ ID NO: 4554 - DNA, 11 bp, Homo sapiens
gagtcaggaga

SEQ ID NO: 4555 - DNA, 11 bp, Homo sapiens
ggggccccctc

SEQ ID NO: 4556 - DNA, 11 bp, Homo sapiens
ctcacttctta

SEQ ID NO: 4557 - DNA, 11 bp, Homo sapiens
ctctgccctcc

SEQ ID NO: 4558 - DNA, 11 bp, Homo sapiens
ctgtgtctgtt

SEQ ID NO: 4559 - DNA, 11 bp, Homo sapiens
gactatagcgc

SEQ ID NO: 4560 - DNA, 11 bp, Homo sapiens
ttttgtgtatt

SEQ ID NO: 4561 - DNA, 11 bp, Homo sapiens
aaggaagattg

SEQ ID NO: 4562 - DNA, 11 bp, Homo sapiens
tgctcagtggt

SEQ ID NO: 4563 - DNA, 11 bp, Homo sapiens
gcatttaaata

SEQ ID NO: 4564 - DNA, 11 bp, Homo sapiens
ctgacctgtgt

SEQ ID NO: 4565 - DNA, 11 bp, Homo sapiens
aaacattagcc

SEQ ID NO: 4566 - DNA, 11 bp, Homo sapiens
ctttgtttaat

SEQ ID NO: 4567 - DNA, 11 bp, Homo sapiens
gagaggagagg

SEQ ID NO: 4568 - DNA, 11 bp, Homo sapiens
gagaactcccc

SEQ ID NO: 4569 - DNA, 11 bp, Homo sapiens
tagttgcaaat

SEQ ID NO: 4570 - DNA, 11 bp, Homo sapiens
gatgctaacca

SEQ ID NO: 4571 - DNA, 11 bp, Homo sapiens
tacctttattg

SEQ ID NO: 4572 - DNA, 11 bp, Homo sapiens
atcacaggtga

SEQ ID NO: 4573 - DNA, 11 bp, Homo sapiens
aacaagtcttt

SEQ ID NO: 4574 - DNA, 11 bp, Homo sapiens
tgggggtttcc

SEQ ID NO: 4575 - DNA, 11 bp, Homo sapiens
gccaagacaca

SEQ ID NO: 4576 - DNA, 11 bp, Homo sapiens
gagactgcaat

SEQ ID NO: 4577 - DNA, 11 bp, Homo sapiens
taaacaggtgg

SEQ ID NO: 4578 - DNA, 11 bp, Homo sapiens
tctgatcagga

SEQ ID NO: 4579 - DNA, 11 bp, Homo sapiens
aagagacatag

SEQ ID NO: 4580 - DNA, 11 bp, Homo sapiens
aagaagcgcaa

SEQ ID NO: 4581 - DNA, 11 bp, Homo sapiens
gcacccaacac

SEQ ID NO: 4582 - DNA, 11 bp, Homo sapiens
agggacttgtg

SEQ ID NO: 4583 - DNA, 11 bp, Homo sapiens
tttgcaaaaaa

SEQ ID NO: 4584 - DNA, 11 bp, Homo sapiens
tgtgtgtgtaa

SEQ ID NO: 4585 - DNA, 11 bp, Homo sapiens
tttgagttctt

SEQ ID NO: 4586 - DNA, 11 bp, Homo sapiens
aactctaagga

SEQ ID NO: 4587 - DNA, 11 bp, Homo sapiens
tggtacttctc

SEQ ID NO: 4588 - DNA, 11 bp, Homo sapiens
gggtgaggggg

SEQ ID NO: 4589 - DNA, 11 bp, Homo sapiens
gctatttccta

SEQ ID NO: 4590 - DNA, 11 bp, Homo sapiens
gagacgcattt

SEQ ID NO: 4591 - DNA, 11 bp, Homo sapiens
cttggtgctgc

SEQ ID NO: 4592 - DNA, 11 bp, Homo sapiens
acccggtacag

SEQ ID NO: 4593 - DNA, 11 bp, Homo sapiens
tatcctctggc

SEQ ID NO: 4594 - DNA, 11 bp, Homo sapiens
aaacaccaaat

SEQ ID NO: 4595 - DNA, 11 bp, Homo sapiens
cccagccactt

SEQ ID NO: 4596 - DNA, 11 bp, Homo sapiens
gcagtgcactc

SEQ ID NO: 4597 - DNA, 11 bp, Homo sapiens
gaaggttgtgg

SEQ ID NO: 4598 - DNA, 11 bp, Homo sapiens
aaaggcaggaa

SEQ ID NO: 4599 - DNA, 11 bp, Homo sapiens
tatcagtgcct

SEQ ID NO: 4600 - DNA, 11 bp, Homo sapiens
gcaaatgtaca

SEQ ID NO: 4601 - DNA, 11 bp, Homo sapiens
cttagtctaaa

SEQ ID NO: 4602 - DNA, 11 bp, Homo sapiens
atgaaatagta

SEQ ID NO: 4603 - DNA, 11 bp, Homo sapiens
gcttgacattg

SEQ ID NO: 4604 - DNA, 11 bp, Homo sapiens
gttccctggcc

SEQ ID NO: 4605 - DNA, 11 bp, Homo sapiens
ctgcaacctaa

SEQ ID NO: 4606 - DNA, 11 bp, Homo sapiens
tgtggtggtgt

SEQ ID NO: 4607 - DNA, 11 bp, Homo sapiens
gacaaaaagtc

SEQ ID NO: 4608 - DNA, 11 bp, Homo sapiens
atctatgaccc

SEQ ID NO: 4609 - DNA, 11 bp, Homo sapiens
taaccgcagat

SEQ ID NO: 4610 - DNA, 11 bp, Homo sapiens
cctgccgtcgg

SEQ ID NO: 4611 - DNA, 11 bp, Homo sapiens
acctcccaccc

SEQ ID NO: 4612 - DNA, 11 bp, Homo sapiens
gggccaataaa

SEQ ID NO: 4613 - DNA, 11 bp, Homo sapiens
aaaaaacccaa

SEQ ID NO: 4614 - DNA, 11 bp, Homo sapiens
ttcaataaaaa

SEQ ID NO: 4615 - DNA, 11 bp, Homo sapiens
ttcactgccga

SEQ ID NO: 4616 - DNA, 11 bp, Homo sapiens
gcttttcagac

SEQ ID NO: 4617 - DNA, 11 bp, Homo sapiens
tagttgtaggg

SEQ ID NO: 4618 - DNA, 11 bp, Homo sapiens
tttggtgtttg

SEQ ID NO: 4619 - DNA, 11 bp, Homo sapiens
tatcttgctta

SEQ ID NO: 4620 - DNA, 11 bp, Homo sapiens
tatctggtctt

SEQ ID NO: 4621 - DNA, 11 bp, Homo sapiens
ggctgggcctg

SEQ ID NO: 4622 - DNA, 11 bp, Homo sapiens
tgtctgtggta

SEQ ID NO: 4623 - DNA, 11 bp, Homo sapiens
agggcttccaa

SEQ ID NO: 4624 - DNA, 11 bp, Homo sapiens
tataggccgaa

SEQ ID NO: 4625 - DNA, 11 bp, Homo sapiens
actgttctctt

SEQ ID NO: 4626 - DNA, 11 bp, Homo sapiens
tcctttgtgcc

SEQ ID NO: 4627 - DNA, 11 bp, Homo sapiens
tttattgaatt

SEQ ID NO: 4628 - DNA, 11 bp, Homo sapiens
tatatggatgt

SEQ ID NO: 4629 - DNA, 11 bp, Homo sapiens
tctagtcactg

SEQ ID NO: 4630 - DNA, 11 bp, Homo sapiens
cagctcttagg

SEQ ID NO: 4631 - DNA, 11 bp, Homo sapiens
ggaccttggag

SEQ ID NO: 4632 - DNA, 11 bp, Homo sapiens
tatattgattg

SEQ ID NO: 4633 - DNA, 11 bp, Homo sapiens
attacaaacct

SEQ ID NO: 4634 - DNA, 11 bp, Homo sapiens
cagtggggtta

SEQ ID NO: 4635 - DNA, 11 bp, Homo sapiens
ctcctcacctg

SEQ ID NO: 4636 - DNA, 11 bp, Homo sapiens
tacattgcttt

SEQ ID NO: 4637 - DNA, 11 bp, Homo sapiens
ctggctgcaaa

SEQ ID NO: 4638 - DNA, 11 bp, Homo sapiens
ggtggggagat

SEQ ID NO: 4639 - DNA, 11 bp, Homo sapiens
aagccttgctg

SEQ ID NO: 4640 - DNA, 11 bp, Homo sapiens
ttagggaggag

SEQ ID NO: 4641 - DNA, 11 bp, Homo sapiens
gaaaagctcct

SEQ ID NO: 4642 - DNA, 11 bp, Homo sapiens
gaaggtcctgc

SEQ ID NO: 4643 - DNA, 11 bp, Homo sapiens
gatctgaggag

SEQ ID NO: 4644 - DNA, 11 bp, Homo sapiens
atgaaaagtgc

SEQ ID NO: 4645 - DNA, 11 bp, Homo sapiens
atatgaagcat

SEQ ID NO: 4646 - DNA, 11 bp, Homo sapiens
ggagggacccc

SEQ ID NO: 4647 - DNA, 11 bp, Homo sapiens
ggagacttcct

SEQ ID NO: 4648 - DNA, 11 bp, Homo sapiens
gctctgccctc

SEQ ID NO: 4649 - DNA, 11 bp, Homo sapiens
aggtgtctttg

SEQ ID NO: 4650 - DNA, 11 bp, Homo sapiens
aacaaatcctt

SEQ ID NO: 4651 - DNA, 11 bp, Homo sapiens
caggcgtgcac

SEQ ID NO: 4652 - DNA, 11 bp, Homo sapiens
tataaattaaa

SEQ ID NO: 4653 - DNA, 11 bp, Homo sapiens
acacacaaaaa

SEQ ID NO: 4654 - DNA, 11 bp, Homo sapiens
aagcaagaatg

SEQ ID NO: 4655 - DNA, 11 bp, Homo sapiens
acttaaggttg

SEQ ID NO: 4656 - DNA, 11 bp, Homo sapiens
gtgtccttgtc

SEQ ID NO: 4657 - DNA, 11 bp, Homo sapiens
ctctcctgctc

SEQ ID NO: 4658 - DNA, 11 bp, Homo sapiens
gccaagtgaac

SEQ ID NO: 4659 - DNA, 11 bp, Homo sapiens
aggccccaggg

SEQ ID NO: 4660 - DNA, 11 bp, Homo sapiens
taacaagtttc

SEQ ID NO: 4661 - DNA, 11 bp, Homo sapiens
gtagtccaaac

SEQ ID NO: 4662 - DNA, 11 bp, Homo sapiens
gtgatgtctgt

SEQ ID NO: 4663 - DNA, 11 bp, Homo sapiens
gtctacaattg

SEQ ID NO: 4664 - DNA, 11 bp, Homo sapiens
ataattgacta

SEQ ID NO: 4665 - DNA, 11 bp, Homo sapiens
ttggtgaagga

SEQ ID NO: 4666 - DNA, 11 bp, Homo sapiens
gcttgttaaga

SEQ ID NO: 4667 - DNA, 11 bp, Homo sapiens
attgtgcttgc

SEQ ID NO: 4668 - DNA, 11 bp, Homo sapiens
aggaaaaaaaa

SEQ ID NO: 4669 - DNA, 11 bp, Homo sapiens
gctgggagggg

SEQ ID NO: 4670 - DNA, 11 bp, Homo sapiens
agtgtgcgctt

SEQ ID NO: 4671 - DNA, 11 bp, Homo sapiens
aacttggctgt

SEQ ID NO: 4672 - DNA, 11 bp, Homo sapiens
ggggactggtg

SEQ ID NO: 4673 - DNA, 11 bp, Homo sapiens
ccagctgccaa

SEQ ID NO: 4674 - DNA, 11 bp, Homo sapiens
aataggtccaa

SEQ ID NO: 4675 - DNA, 11 bp, Homo sapiens
ttggcattgtc

SEQ ID NO: 4676 - DNA, 11 bp, Homo sapiens
ccccagttgct

SEQ ID NO: 4677 - DNA, 11 bp, Homo sapiens
gcataataggt

SEQ ID NO: 4678 - DNA, 11 bp, Homo sapiens
ctctgatgcag

SEQ ID NO: 4679 - DNA, 11 bp, Homo sapiens
gtcattatgct

SEQ ID NO: 4680 - DNA, 11 bp, Homo sapiens
taaactgttaa

SEQ ID NO: 4681 - DNA, 11 bp, Homo sapiens
ctagccagcag

SEQ ID NO: 4682 - DNA, 11 bp, Homo sapiens
gctaaactctg

SEQ ID NO: 4683 - DNA, 11 bp, Homo sapiens
agacgcttctg

SEQ ID NO: 4684 - DNA, 11 bp, Homo sapiens
gatctgtttct

SEQ ID NO: 4685 - DNA, 11 bp, Homo sapiens
ctggcctgtgt

SEQ ID NO: 4686 - DNA, 11 bp, Homo sapiens
gctgtttaaaa

SEQ ID NO: 4687 - DNA, 11 bp, Homo sapiens
ccctgtaataa

SEQ ID NO: 4688 - DNA, 11 bp, Homo sapiens
tctggggacga

SEQ ID NO: 4689 - DNA, 11 bp, Homo sapiens
atttcttgccg

SEQ ID NO: 4690 - DNA, 11 bp, Homo sapiens
attaaattcag

SEQ ID NO: 4691 - DNA, 11 bp, Homo sapiens
cctttcaagca

SEQ ID NO: 4692 - DNA, 11 bp, Homo sapiens
taatcccagca

SEQ ID NO: 4693 - DNA, 11 bp, Homo sapiens
tcttccccagt

SEQ ID NO: 4694 - DNA, 11 bp, Homo sapiens
tgcctgcacca

SEQ ID NO: 4695 - DNA, 11 bp, Homo sapiens
ccgtggtcgtg

SEQ ID NO: 4696 - DNA, 11 bp, Homo sapiens
gggaaaccctg

SEQ ID NO: 4697 - DNA, 11 bp, Homo sapiens
gcttctgcata

SEQ ID NO: 4698 - DNA, 11 bp, Homo sapiens
gttgcattttc

SEQ ID NO: 4699 - DNA, 11 bp, Homo sapiens
gtgatacgttg

SEQ ID NO: 4700 - DNA, 11 bp, Homo sapiens
cagtttgaaat

SEQ ID NO: 4701 - DNA, 11 bp, Homo sapiens
cagtgattcca

SEQ ID NO: 4702 - DNA, 11 bp, Homo sapiens
catatttgtga

SEQ ID NO: 4703 - DNA, 11 bp, Homo sapiens
tacatttgcaa

SEQ ID NO: 4704 - DNA, 11 bp, Homo sapiens
taattgcagat

SEQ ID NO: 4705 - DNA, 11 bp, Homo sapiens
ccatccgcagg

SEQ ID NO: 4706 - DNA, 11 bp, Homo sapiens
caatggagctt

SEQ ID NO: 4707 - DNA, 11 bp, Homo sapiens
ttgtaccacct

SEQ ID NO: 4708 - DNA, 11 bp, Homo sapiens
gcctccagatt

SEQ ID NO: 4709 - DNA, 11 bp, Homo sapiens
taaaataaaag

SEQ ID NO: 4710 - DNA, 11 bp, Homo sapiens
gtatggactat

SEQ ID NO: 4711 - DNA, 11 bp, Homo sapiens
aacctgttcta

SEQ ID NO: 4712 - DNA, 11 bp, Homo sapiens
tgtggcccacc

SEQ ID NO: 4713 - DNA, 11 bp, Homo sapiens
tttgtggtcaa

SEQ ID NO: 4714 - DNA, 11 bp, Homo sapiens
acatttttaac

SEQ ID NO: 4715 - DNA, 11 bp, Homo sapiens
tgccccgcact

SEQ ID NO: 4716 - DNA, 11 bp, Homo sapiens
cctgggggccg

SEQ ID NO: 4717 - DNA, 11 bp, Homo sapiens
gatttaaatca

SEQ ID NO: 4718 - DNA, 11 bp, Homo sapiens
agccctggctg

SEQ ID NO: 4719 - DNA, 11 bp, Homo sapiens
ggcgcactctg

SEQ ID NO: 4720 - DNA, 11 bp, Homo sapiens
caggagaactg

SEQ ID NO: 4721 - DNA, 11 bp, Homo sapiens
aaaacttttgt

SEQ ID NO: 4722 - DNA, 11 bp, Homo sapiens
aactctcaatg

SEQ ID NO: 4723 - DNA, 11 bp, Homo sapiens
aggaaactggg

SEQ ID NO: 4724 - DNA, 11 bp, Homo sapiens
ttttgcaacaa

SEQ ID NO: 4725 - DNA, 11 bp, Homo sapiens
ggaaaattggt

SEQ ID NO: 4726 - DNA, 11 bp, Homo sapiens
gaactgtgagt

SEQ ID NO: 4727 - DNA, 11 bp, Homo sapiens
tacaccagcaa

SEQ ID NO: 4728 - DNA, 11 bp, Homo sapiens
tgcagcacgag

SEQ ID NO: 4729 - DNA, 11 bp, Homo sapiens
ctggatgggca

SEQ ID NO: 4730 - DNA, 11 bp, Homo sapiens
cagggagcgcc

SEQ ID NO: 4731 - DNA, 11 bp, Homo sapiens
cgtgtgcctgt

SEQ ID NO: 4732 - DNA, 11 bp, Homo sapiens
ttctctccaca

SEQ ID NO: 4733 - DNA, 11 bp, Homo sapiens
ccccatactac

SEQ ID NO: 4734 - DNA, 11 bp, Homo sapiens
ttgtaataaaa

SEQ ID NO: 4735 - DNA, 11 bp, Homo sapiens
tttacaaataa

SEQ ID NO: 4736 - DNA, 11 bp, Homo sapiens
ttaaccctcta

SEQ ID NO: 4737 - DNA, 11 bp, Homo sapiens
aaggtagcaga

SEQ ID NO: 4738 - DNA, 11 bp, Homo sapiens
gacctcctgcc

SEQ ID NO: 4739 - DNA, 11 bp, Homo sapiens
ttaccatatca

SEQ ID NO: 4740 - DNA, 11 bp, Homo sapiens
aaatacagcag

SEQ ID NO: 4741 - DNA, 11 bp, Homo sapiens
cccgtccggaa

SEQ ID NO: 4742 - DNA, 11 bp, Homo sapiens
ttgagccagcc

SEQ ID NO: 4743 - DNA, 11 bp, Homo sapiens
cctgaggtcag

SEQ ID NO: 4744 - DNA, 11 bp, Homo sapiens
taacattggtg

SEQ ID NO: 4745 - DNA, 11 bp, Homo sapiens
gtagaaaaaaa

SEQ ID NO: 4746 - DNA, 11 bp, Homo sapiens
gggctctgagc

SEQ ID NO: 4747 - DNA, 11 bp, Homo sapiens
cttttcatcat

SEQ ID NO: 4748 - DNA, 11 bp, Homo sapiens
tcactgatctt

SEQ ID NO: 4749 - DNA, 11 bp, Homo sapiens
gctggaataaa

SEQ ID NO: 4750 - DNA, 11 bp, Homo sapiens
ttggccgggct

SEQ ID NO: 4751 - DNA, 11 bp, Homo sapiens
aaagtctagaa

SEQ ID NO: 4752 - DNA, 11 bp, Homo sapiens
gagcttttgaa

SEQ ID NO: 4753 - DNA, 11 bp, Homo sapiens
tcctagcctgt

SEQ ID NO: 4754 - DNA, 11 bp, Homo sapiens
cctgaaatttg

SEQ ID NO: 4755 - DNA, 11 bp, Homo sapiens
ttaatcctaaa

SEQ ID NO: 4756 - DNA, 11 bp, Homo sapiens
ataattctttg

SEQ ID NO: 4757 - DNA, 11 bp, Homo sapiens
acatttcattt

SEQ ID NO: 4758 - DNA, 11 bp, Homo sapiens
tccagggccgc

SEQ ID NO: 4759 - DNA, 11 bp, Homo sapiens
gaaccacagga

SEQ ID NO: 4760 - DNA, 11 bp, Homo sapiens
aatatttagtg

SEQ ID NO: 4761 - DNA, 11 bp, Homo sapiens
actttttggct

SEQ ID NO: 4762 - DNA, 11 bp, Homo sapiens
gaagcaaaaaa

SEQ ID NO: 4763 - DNA, 11 bp, Homo sapiens
gccgctgccag

SEQ ID NO: 4764 - DNA, 11 bp, Homo sapiens
ctcagaacact

SEQ ID NO: 4765 - DNA, 11 bp, Homo sapiens
atggtctcctg

SEQ ID NO: 4766 - DNA, 11 bp, Homo sapiens
tttgtttttat

SEQ ID NO: 4767 - DNA, 11 bp, Homo sapiens
agtaccttata

SEQ ID NO: 4768 - DNA, 11 bp, Homo sapiens
cctgaaaaaaa

SEQ ID NO: 4769 - DNA, 11 bp, Homo sapiens
aatgccccact

SEQ ID NO: 4770 - DNA, 11 bp, Homo sapiens
tcagactagtt

SEQ ID NO: 4771 - DNA, 11 bp, Homo sapiens
tctggcaaaga

SEQ ID NO: 4772 - DNA, 11 bp, Homo sapiens
aggcgagctgc

SEQ ID NO: 4773 - DNA, 11 bp, Homo sapiens
gttcattttga

SEQ ID NO: 4774 - DNA, 11 bp, Homo sapiens
ttaaagagccg

SEQ ID NO: 4775 - DNA, 11 bp, Homo sapiens
gaatttcccag

SEQ ID NO: 4776 - DNA, 11 bp, Homo sapiens
aaaaataaaga

SEQ ID NO: 4777 - DNA, 11 bp, Homo sapiens
gcaactttttg

SEQ ID NO: 4778 - DNA, 11 bp, Homo sapiens
agcggctacac

SEQ ID NO: 4779 - DNA, 11 bp, Homo sapiens
tgcaactacaa

SEQ ID NO: 4780 - DNA, 11 bp, Homo sapiens
ggcctggaatt

SEQ ID NO: 4781 - DNA, 11 bp, Homo sapiens
tattcctgtga

SEQ ID NO: 4782 - DNA, 11 bp, Homo sapiens
atgcccaatgt

SEQ ID NO: 4783 - DNA, 11 bp, Homo sapiens
gaaataaaaag

SEQ ID NO: 4784 - DNA, 11 bp, Homo sapiens
gcctttctaat

SEQ ID NO: 4785 - DNA, 11 bp, Homo sapiens
cattttactgg

SEQ ID NO: 4786 - DNA, 11 bp, Homo sapiens
gccagattgag

SEQ ID NO: 4787 - DNA, 11 bp, Homo sapiens
ttttattaaag

SEQ ID NO: 4788 - DNA, 11 bp, Homo sapiens
aagtggaataa

SEQ ID NO: 4789 - DNA, 11 bp, Homo sapiens
gatctcactgt

SEQ ID NO: 4790 - DNA, 11 bp, Homo sapiens
gagactcctgc

SEQ ID NO: 4791 - DNA, 11 bp, Homo sapiens
tgcacttcaag

SEQ ID NO: 4792 - DNA, 11 bp, Homo sapiens
aaagaaagtgg

SEQ ID NO: 4793 - DNA, 11 bp, Homo sapiens
tccatctgttg

SEQ ID NO: 4794 - DNA, 11 bp, Homo sapiens
atccacccgcc

SEQ ID NO: 4795 - DNA, 11 bp, Homo sapiens
ctgcttcctga

SEQ ID NO: 4796 - DNA, 11 bp, Homo sapiens
tgcttattgaa

SEQ ID NO: 4797 - DNA, 11 bp, Homo sapiens
actcacgattg

SEQ ID NO: 4798 - DNA, 11 bp, Homo sapiens
ggatgtggagg

SEQ ID NO: 4799 - DNA, 11 bp, Homo sapiens
aattcccgtcc

SEQ ID NO: 4800 - DNA, 11 bp, Homo sapiens
agcacatttga

SEQ ID NO: 4801 - DNA, 11 bp, Homo sapiens
cactacacggg

SEQ ID NO: 4802 - DNA, 11 bp, Homo sapiens
gttcaaagact

SEQ ID NO: 4803 - DNA, 11 bp, Homo sapiens
ctcaagcacca

SEQ ID NO: 4804 - DNA, 11 bp, Homo sapiens
accacttatcc

SEQ ID NO: 4805 - DNA, 11 bp, Homo sapiens
gacataaatcc

SEQ ID NO: 4806 - DNA, 11 bp, Homo sapiens
ggttcctggtg

SEQ ID NO: 4807 - DNA, 11 bp, Homo sapiens
atttctgctgg

SEQ ID NO: 4808 - DNA, 11 bp, Homo sapiens
gctctgtaagc

SEQ ID NO: 4809 - DNA, 11 bp, Homo sapiens
gtgagaccccc

SEQ ID NO: 4810 - DNA, 11 bp, Homo sapiens
ctgttaataaa

SEQ ID NO: 4811 - DNA, 11 bp, Homo sapiens
gttgagtaaca

SEQ ID NO: 4812 - DNA, 11 bp, Homo sapiens
caactttaggg

SEQ ID NO: 4813 - DNA, 11 bp, Homo sapiens
gctactattag

SEQ ID NO: 4814 - DNA, 11 bp, Homo sapiens
atgtgaagaat

SEQ ID NO: 4815 - DNA, 11 bp, Homo sapiens
acctgcccctc

SEQ ID NO: 4816 - DNA, 11 bp, Homo sapiens
cctgtcctgca

SEQ ID NO: 4817 - DNA, 11 bp, Homo sapiens
cctttgtaagt

SEQ ID NO: 4818 - DNA, 11 bp, Homo sapiens
aaggacctttt

SEQ ID NO: 4819 - DNA, 11 bp, Homo sapiens
atcgggcccgg

SEQ ID NO: 4820 - DNA, 11 bp, Homo sapiens
aaaaataaagc

SEQ ID NO: 4821 - DNA, 11 bp, Homo sapiens
actgatctgca

SEQ ID NO: 4822 - DNA, 11 bp, Homo sapiens
tctctgcaaaa

SEQ ID NO: 4823 - DNA, 11 bp, Homo sapiens
agcctggactg

SEQ ID NO: 4824 - DNA, 11 bp, Homo sapiens
ccccgccaagt

SEQ ID NO: 4825 - DNA, 11 bp, Homo sapiens
tcaaaaaaaaa

SEQ ID NO: 4826 - DNA, 11 bp, Homo sapiens
ttataactgaa

SEQ ID NO: 4827 - DNA, 11 bp, Homo sapiens
tgctgcctcag

SEQ ID NO: 4828 - DNA, 11 bp, Homo sapiens
ctagtcacttc

SEQ ID NO: 4829 - DNA, 11 bp, Homo sapiens
aatgagcaact

SEQ ID NO: 4830 - DNA, 11 bp, Homo sapiens
caattccttca

SEQ ID NO: 4831 - DNA, 11 bp, Homo sapiens
agctgggatgg

SEQ ID NO: 4832 - DNA, 11 bp, Homo sapiens
ccacgtggctg

SEQ ID NO: 4833 - DNA, 11 bp, Homo sapiens
gcaccttctgg

SEQ ID NO: 4834 - DNA, 11 bp, Homo sapiens
ccctgtttttt

SEQ ID NO: 4835 - DNA, 11 bp, Homo sapiens
ttttttcttca

SEQ ID NO: 4836 - DNA, 11 bp, Homo sapiens
ttctagaccat

SEQ ID NO: 4837 - DNA, 11 bp, Homo sapiens
gagatgaaatg

SEQ ID NO: 4838 - DNA, 11 bp, Homo sapiens
gtctgtgtatg

SEQ ID NO: 4839 - DNA, 11 bp, Homo sapiens
ccaagaggaaa

SEQ ID NO: 4840 - DNA, 11 bp, Homo sapiens
aatcaaggtgt

SEQ ID NO: 4841 - DNA, 11 bp, Homo sapiens
ccctgaggcca

SEQ ID NO: 4842 - DNA, 11 bp, Homo sapiens
tctgaagactt

SEQ ID NO: 4843 - DNA, 11 bp, Homo sapiens
ttggatatgtg

SEQ ID NO: 4844 - DNA, 11 bp, Homo sapiens
cattgtcttca

SEQ ID NO: 4845 - DNA, 11 bp, Homo sapiens
tgtgaagatta

SEQ ID NO: 4846 - DNA, 11 bp, Homo sapiens
aagtgaagagc

SEQ ID NO: 4847 - DNA, 11 bp, Homo sapiens
tcgtcctagaa

SEQ ID NO: 4848 - DNA, 11 bp, Homo sapiens
actgataacag

SEQ ID NO: 4849 - DNA, 11 bp, Homo sapiens
attttggattc

SEQ ID NO: 4850 - DNA, 11 bp, Homo sapiens
cagtgcccaac

SEQ ID NO: 4851 - DNA, 11 bp, Homo sapiens
cattggtagaa

SEQ ID NO: 4852 - DNA, 11 bp, Homo sapiens
tgaaaatcaaa

SEQ ID NO: 4853 - DNA, 11 bp, Homo sapiens
aggctgcggtg

SEQ ID NO: 4854 - DNA, 11 bp, Homo sapiens
taactccattg

SEQ ID NO: 4855 - DNA, 11 bp, Homo sapiens
ccgcccttcgg

SEQ ID NO: 4856 - DNA, 11 bp, Homo sapiens
acttaacattt

SEQ ID NO: 4857 - DNA, 11 bp, Homo sapiens
aggcttctagc

SEQ ID NO: 4858 - DNA, 11 bp, Homo sapiens
gtgactgccag

SEQ ID NO: 4859 - DNA, 11 bp, Homo sapiens
attagtcagaa

SEQ ID NO: 4860 - DNA, 11 bp, Homo sapiens
ttaacactgtg

SEQ ID NO: 4861 - DNA, 11 bp, Homo sapiens
aattaccaaag

SEQ ID NO: 4862 - DNA, 11 bp, Homo sapiens
gtatcttaata

SEQ ID NO: 4863 - DNA, 11 bp, Homo sapiens
tgttctcaagt

SEQ ID NO: 4864 - DNA, 11 bp, Homo sapiens
cctaagggaga

SEQ ID NO: 4865 - DNA, 11 bp, Homo sapiens
tctccacgaag

SEQ ID NO: 4866 - DNA, 11 bp, Homo sapiens
gtttggatctg

SEQ ID NO: 4867 - DNA, 11 bp, Homo sapiens
taagattagaa

SEQ ID NO: 4868 - DNA, 11 bp, Homo sapiens
tatttgctaca

SEQ ID NO: 4869 - DNA, 11 bp, Homo sapiens
gtggatggact

SEQ ID NO: 4870 - DNA, 11 bp, Homo sapiens
gggaataaacc

SEQ ID NO: 4871 - DNA, 11 bp, Homo sapiens
atcagtgtgca

SEQ ID NO: 4872 - DNA, 11 bp, Homo sapiens
gccataaaatg

SEQ ID NO: 4873 - DNA, 11 bp, Homo sapiens
aagttgctatt

SEQ ID NO: 4874 - DNA, 11 bp, Homo sapiens
ctcatagcagt

SEQ ID NO: 4875 - DNA, 11 bp, Homo sapiens
ggctgagaatg

SEQ ID NO: 4876 - DNA, 11 bp, Homo sapiens
ggatgtgaaag

SEQ ID NO: 4877 - DNA, 11 bp, Homo sapiens
ttacacctgtg

SEQ ID NO: 4878 - DNA, 11 bp, Homo sapiens
ccacctgcttt

SEQ ID NO: 4879 - DNA, 11 bp, Homo sapiens
agcactgtact

SEQ ID NO: 4880 - DNA, 11 bp, Homo sapiens
cccggctcctc

SEQ ID NO: 4881 - DNA, 11 bp, Homo sapiens
gttttcctgaa

SEQ ID NO: 4882 - DNA, 11 bp, Homo sapiens
tgcctcccatc

SEQ ID NO: 4883 - DNA, 11 bp, Homo sapiens
gtgacgtgcac

SEQ ID NO: 4884 - DNA, 11 bp, Homo sapiens
gcttggctccc

SEQ ID NO: 4885 - DNA, 11 bp, Homo sapiens
gggggcaggtc

SEQ ID NO: 4886 - DNA, 11 bp, Homo sapiens
ctttttgtgcc

SEQ ID NO: 4887 - DNA, 11 bp, Homo sapiens
gaagcaggacc

SEQ ID NO: 4888 - DNA, 11 bp, Homo sapiens
ttgtgatgtaa

SEQ ID NO: 4889 - DNA, 11 bp, Homo sapiens
aagcgggacct

SEQ ID NO: 4890 - DNA, 11 bp, Homo sapiens
gtttctatcaa

SEQ ID NO: 4891 - DNA, 11 bp, Homo sapiens
gagatccgcaa

SEQ ID NO: 4892 - DNA, 11 bp, Homo sapiens
acaaaataaaa

SEQ ID NO: 4893 - DNA, 11 bp, Homo sapiens
cattgcaggat

SEQ ID NO: 4894 - DNA, 11 bp, Homo sapiens
gtccctctcaa

SEQ ID NO: 4895 - DNA, 11 bp, Homo sapiens
tgaacagtaat

SEQ ID NO: 4896 - DNA, 11 bp, Homo sapiens
tccagaatcct

SEQ ID NO: 4897 - DNA, 11 bp, Homo sapiens
aacaactggct

SEQ ID NO: 4898 - DNA, 11 bp, Homo sapiens
caggtcaagaa

SEQ ID NO: 4899 - DNA, 11 bp, Homo sapiens
ctgcctccgtg

SEQ ID NO: 4900 - DNA, 11 bp, Homo sapiens
attacaccacg

SEQ ID NO: 4901 - DNA, 11 bp, Homo sapiens
tacctgcagaa

SEQ ID NO: 4902 - DNA, 11 bp, Homo sapiens
ccaaatgatga

SEQ ID NO: 4903 - DNA, 11 bp, Homo sapiens
tcacgcgctcc

SEQ ID NO: 4904 - DNA, 11 bp, Homo sapiens
ctgggatgcag

SEQ ID NO: 4905 - DNA, 11 bp, Homo sapiens
caactatccgt

SEQ ID NO: 4906 - DNA, 11 bp, Homo sapiens
gcttcatcaga

SEQ ID NO: 4907 - DNA, 11 bp, Homo sapiens
atacactttgt

SEQ ID NO: 4908 - DNA, 11 bp, Homo sapiens
gcttggagtta

SEQ ID NO: 4909 - DNA, 11 bp, Homo sapiens
ggggcagagag

SEQ ID NO: 4910 - DNA, 11 bp, Homo sapiens
gaagcaagaaa

SEQ ID NO: 4911 - DNA, 11 bp, Homo sapiens
ttgaagtcaaa

SEQ ID NO: 4912 - DNA, 11 bp, Homo sapiens
tgcaggtactg

SEQ ID NO: 4913 - DNA, 11 bp, Homo sapiens
ggggaaattgg

SEQ ID NO: 4914 - DNA, 11 bp, Homo sapiens
gaaatcccaat

SEQ ID NO: 4915 - DNA, 11 bp, Homo sapiens
ggaagaagaaa

SEQ ID NO: 4916 - DNA, 11 bp, Homo sapiens
gaggaggtgga

SEQ ID NO: 4917 - DNA, 11 bp, Homo sapiens
tagaaatgttc

SEQ ID NO: 4918 - DNA, 11 bp, Homo sapiens
atgactgctgt

SEQ ID NO: 4919 - DNA, 11 bp, Homo sapiens
gcattcgcagt

SEQ ID NO: 4920 - DNA, 11 bp, Homo sapiens
ttacacagact

SEQ ID NO: 4921 - DNA, 11 bp, Homo sapiens
ctgggagggag

SEQ ID NO: 4922 - DNA, 11 bp, Homo sapiens
ttgtgttcttt

SEQ ID NO: 4923 - DNA, 11 bp, Homo sapiens
tttttccttaa

SEQ ID NO: 4924 - DNA, 11 bp, Homo sapiens
agcagcctttt

SEQ ID NO: 4925 - DNA, 11 bp, Homo sapiens
atccatctgtg

SEQ ID NO: 4926 - DNA, 11 bp, Homo sapiens
cttctactaat

SEQ ID NO: 4927 - DNA, 11 bp, Homo sapiens
cgcgtgcacac

SEQ ID NO: 4928 - DNA, 11 bp, Homo sapiens
gtagcagggct

SEQ ID NO: 4929 - DNA, 11 bp, Homo sapiens
tgcagaacggc

SEQ ID NO: 4930 - DNA, 11 bp, Homo sapiens
tctgcaatgaa

SEQ ID NO: 4931 - DNA, 11 bp, Homo sapiens
tgagtggacag

SEQ ID NO: 4932 - DNA, 11 bp, Homo sapiens
ccaggctgcgt

SEQ ID NO: 4933 - DNA, 11 bp, Homo sapiens
tttctgctcct

SEQ ID NO: 4934 - DNA, 11 bp, Homo sapiens
ctttgcactct

SEQ ID NO: 4935 - DNA, 11 bp, Homo sapiens
gctgtataatt

SEQ ID NO: 4936 - DNA, 11 bp, Homo sapiens
ggttgagtgtg

SEQ ID NO: 4937 - DNA, 11 bp, Homo sapiens
tacagttccct

SEQ ID NO: 4938 - DNA, 11 bp, Homo sapiens
ccactttttaa

SEQ ID NO: 4939 - DNA, 11 bp, Homo sapiens
gatccgctcta

SEQ ID NO: 4940 - DNA, 11 bp, Homo sapiens
gttttccggtt

SEQ ID NO: 4941 - DNA, 11 bp, Homo sapiens
agtatgccact

SEQ ID NO: 4942 - DNA, 11 bp, Homo sapiens
caagcaggaca

SEQ ID NO: 4943 - DNA, 11 bp, Homo sapiens
gccgtgagcag

SEQ ID NO: 4944 - DNA, 11 bp, Homo sapiens
gagtgagaccc

SEQ ID NO: 4945 - DNA, 11 bp, Homo sapiens
acctcaggaaa

SEQ ID NO: 4946 - DNA, 11 bp, Homo sapiens
gggctggggtc

SEQ ID NO: 4947 - DNA, 11 bp, Homo sapiens
gactcgcccac

SEQ ID NO: 4948 - DNA, 11 bp, Homo sapiens
ggactttcctt

SEQ ID NO: 4949 - DNA, 11 bp, Homo sapiens
tgaaaactact

SEQ ID NO: 4950 - DNA, 11 bp, Homo sapiens
ctatgtgttac

SEQ ID NO: 4951 - DNA, 11 bp, Homo sapiens
tgggttttaaa

SEQ ID NO: 4952 - DNA, 11 bp, Homo sapiens
catttagattt

SEQ ID NO: 4953 - DNA, 11 bp, Homo sapiens
cctggaatccc

SEQ ID NO: 4954 - DNA, 11 bp, Homo sapiens
tgaatgatttt

SEQ ID NO: 4955 - DNA, 11 bp, Homo sapiens
gccagaagggg

SEQ ID NO: 4956 - DNA, 11 bp, Homo sapiens
aagaaatgcaa

SEQ ID NO: 4957 - DNA, 11 bp, Homo sapiens
ctcttatttca

SEQ ID NO: 4958 - DNA, 11 bp, Homo sapiens
tgtgtgttagc

SEQ ID NO: 4959 - DNA, 11 bp, Homo sapiens
accgcacaaat

SEQ ID NO: 4960 - DNA, 11 bp, Homo sapiens
tggccctttca

SEQ ID NO: 4961 - DNA, 11 bp, Homo sapiens
ggctttgtacg

SEQ ID NO: 4962 - DNA, 11 bp, Homo sapiens
ttcgtattaca

SEQ ID NO: 4963 - DNA, 11 bp, Homo sapiens
ttctgtgtata

SEQ ID NO: 4964 - DNA, 11 bp, Homo sapiens
tgtgacactga

SEQ ID NO: 4965 - DNA, 11 bp, Homo sapiens
ggctgaatttt

SEQ ID NO: 4966 - DNA, 11 bp, Homo sapiens
aaacctgagaa

SEQ ID NO: 4967 - DNA, 11 bp, Homo sapiens
tcttcagtagc

SEQ ID NO: 4968 - DNA, 11 bp, Homo sapiens
gagctcaagat

SEQ ID NO: 4969 - DNA, 11 bp, Homo sapiens
tatggggtcac

SEQ ID NO: 4970 - DNA, 11 bp, Homo sapiens
atgatgcctct

SEQ ID NO: 4971 - DNA, 11 bp, Homo sapiens
gttaaaccctg

SEQ ID NO: 4972 - DNA, 11 bp, Homo sapiens
taataagcact

SEQ ID NO: 4973 - DNA, 11 bp, Homo sapiens
ggaggggaggc

SEQ ID NO: 4974 - DNA, 11 bp, Homo sapiens
ttatccttcac

SEQ ID NO: 4975 - DNA, 11 bp, Homo sapiens
aatattaagac

SEQ ID NO: 4976 - DNA, 11 bp, Homo sapiens
aagtgcatttg

SEQ ID NO: 4977 - DNA, 11 bp, Homo sapiens
taatgaaattg

SEQ ID NO: 4978 - DNA, 11 bp, Homo sapiens
cacctcatccc

SEQ ID NO: 4979 - DNA, 11 bp, Homo sapiens
aacaaattctt

SEQ ID NO: 4980 - DNA, 11 bp, Homo sapiens
gggcttggtat

SEQ ID NO: 4981 - DNA, 11 bp, Homo sapiens
ggctgggggcc

SEQ ID NO: 4982 - DNA, 11 bp, Homo sapiens
tatgtgatttg

SEQ ID NO: 4983 - DNA, 11 bp, Homo sapiens
acaacactaca

SEQ ID NO: 4984 - DNA, 11 bp, Homo sapiens
atggccataga

SEQ ID NO: 4985 - DNA, 11 bp, Homo sapiens
aaagcagcaca

SEQ ID NO: 4986 - DNA, 11 bp, Homo sapiens
acttggagccg

SEQ ID NO: 4987 - DNA, 11 bp, Homo sapiens
tgcgcgccctg

SEQ ID NO: 4988 - DNA, 11 bp, Homo sapiens
aagataatgcc

SEQ ID NO: 4989 - DNA, 11 bp, Homo sapiens
agcacgacccg

SEQ ID NO: 4990 - DNA, 11 bp, Homo sapiens
tagtagatgct

SEQ ID NO: 4991 - DNA, 11 bp, Homo sapiens
cctcactttct

SEQ ID NO: 4992 - DNA, 11 bp, Homo sapiens
ttagttaagca

SEQ ID NO: 4993 - DNA, 11 bp, Homo sapiens
acatcctcacc

SEQ ID NO: 4994 - DNA, 11 bp, Homo sapiens
tcagctggccc

SEQ ID NO: 4995 - DNA, 11 bp, Homo sapiens
gccttccaata

SEQ ID NO: 4996 - DNA, 11 bp, Homo sapiens
ctcccccaagc

SEQ ID NO: 4997 - DNA, 11 bp, Homo sapiens
ccctcctgggg

SEQ ID NO: 4998 - DNA, 11 bp, Homo sapiens
gaatcactgcc

SEQ ID NO: 4999 - DNA, 11 bp, Homo sapiens
ttctctcaact

SEQ ID NO: 5000 - DNA, 11 bp, Homo sapiens
taaccaaacac

SEQ ID NO: 5001 - DNA, 11 bp, Homo sapiens
tcattttccaa

SEQ ID NO: 5002 - DNA, 11 bp, Homo sapiens
gaaatttgaaa

SEQ ID NO: 5003 - DNA, 11 bp, Homo sapiens
tcaagaaacat

SEQ ID NO: 5004 - DNA, 11 bp, Homo sapiens
caaataaaatg

SEQ ID NO: 5005 - DNA, 11 bp, Homo sapiens
gttctcaggaa

SEQ ID NO: 5006 - DNA, 11 bp, Homo sapiens
gtgtaaatgga

SEQ ID NO: 5007 - DNA, 11 bp, Homo sapiens
ccacaccggta

SEQ ID NO: 5008 - DNA, 11 bp, Homo sapiens
aggtctgccag

SEQ ID NO: 5009 - DNA, 11 bp, Homo sapiens
tagatgtgatg

SEQ ID NO: 5010 - DNA, 11 bp, Homo sapiens
taataaaaccc

SEQ ID NO: 5011 - DNA, 11 bp, Homo sapiens
acccacctgca

SEQ ID NO: 5012 - DNA, 11 bp, Homo sapiens
gagcctcatcc

SEQ ID NO: 5013 - DNA, 11 bp, Homo sapiens
tgggaagaggg

SEQ ID NO: 5014 - DNA, 11 bp, Homo sapiens
cggcaggaaaa

SEQ ID NO: 5015 - DNA, 11 bp, Homo sapiens
atgtataataa

SEQ ID NO: 5016 - DNA, 11 bp, Homo sapiens
ggtccagcatc

SEQ ID NO: 5017 - DNA, 11 bp, Homo sapiens
tttaatctcag

SEQ ID NO: 5018 - DNA, 11 bp, Homo sapiens
agattactgat

SEQ ID NO: 5019 - DNA, 11 bp, Homo sapiens
tgttgggttct

SEQ ID NO: 5020 - DNA, 11 bp, Homo sapiens
caagagagtag

SEQ ID NO: 5021 - DNA, 11 bp, Homo sapiens
tgacacagcca

SEQ ID NO: 5022 - DNA, 11 bp, Homo sapiens
ctgaattcagt

SEQ ID NO: 5023 - DNA, 11 bp, Homo sapiens
aatattgtccg

SEQ ID NO: 5024 - DNA, 11 bp, Homo sapiens
acttcacaaag

SEQ ID NO: 5025 - DNA, 11 bp, Homo sapiens
gttttgtggga

SEQ ID NO: 5026 - DNA, 11 bp, Homo sapiens
tttcatccact

SEQ ID NO: 5027 - DNA, 11 bp, Homo sapiens
gtaaaacaata

SEQ ID NO: 5028 - DNA, 11 bp, Homo sapiens
tttcattaatc

SEQ ID NO: 5029 - DNA, 11 bp, Homo sapiens
gggaaactcca

SEQ ID NO: 5030 - DNA, 11 bp, Homo sapiens
tgcctgtgaaa

SEQ ID NO: 5031 - DNA, 11 bp, Homo sapiens
atgcattgttt

SEQ ID NO: 5032 - DNA, 11 bp, Homo sapiens
ctgtgattgtg

SEQ ID NO: 5033 - DNA, 11 bp, Homo sapiens
ccaaaattcta

SEQ ID NO: 5034 - DNA, 11 bp, Homo sapiens
gacctgcactc

SEQ ID NO: 5035 - DNA, 11 bp, Homo sapiens
cctctggcagc

SEQ ID NO: 5036 - DNA, 11 bp, Homo sapiens
gcagaagcaca

SEQ ID NO: 5037 - DNA, 11 bp, Homo sapiens
gtgatgtgcac

SEQ ID NO: 5038 - DNA, 11 bp, Homo sapiens
aaaacctgaaa

SEQ ID NO: 5039 - DNA, 11 bp, Homo sapiens
tataataaata

SEQ ID NO: 5040 - DNA, 11 bp, Homo sapiens
gacgacacgag

SEQ ID NO: 5041 - DNA, 11 bp, Homo sapiens
tggcccccgcc

SEQ ID NO: 5042 - DNA, 11 bp, Homo sapiens
taatcctcaag

SEQ ID NO: 5043 - DNA, 11 bp, Homo sapiens
gttctggttta

SEQ ID NO: 5044 - DNA, 11 bp, Homo sapiens
taagtagcaaa

SEQ ID NO: 5045 - DNA, 11 bp, Homo sapiens
gcttacctttc

SEQ ID NO: 5046 - DNA, 11 bp, Homo sapiens
ccactcctcca

SEQ ID NO: 5047 - DNA, 11 bp, Homo sapiens
cagcgctttga

SEQ ID NO: 5048 - DNA, 11 bp, Homo sapiens
gtactccagtt

SEQ ID NO: 5049 - DNA, 11 bp, Homo sapiens
gcaggaggtga

SEQ ID NO: 5050 - DNA, 11 bp, Homo sapiens
ggagctgctgc

SEQ ID NO: 5051 - DNA, 11 bp, Homo sapiens
gccccgccctc

SEQ ID NO: 5052 - DNA, 11 bp, Homo sapiens
gagggagtttc

SEQ ID NO: 5053 - DNA, 11 bp, Homo sapiens
ttcctccacgc

SEQ ID NO: 5054 - DNA, 11 bp, Homo sapiens
gcctgggctgg

SEQ ID NO: 5055 - DNA, 11 bp, Homo sapiens
gacagtgtggg

SEQ ID NO: 5056 - DNA, 11 bp, Homo sapiens
aatccaggagg

SEQ ID NO: 5057 - DNA, 11 bp, Homo sapiens
ccccctggatc

SEQ ID NO: 5058 - DNA, 11 bp, Homo sapiens
tacagtatgtt

SEQ ID NO: 5059 - DNA, 11 bp, Homo sapiens
cccatcatccc

SEQ ID NO: 5060 - DNA, 11 bp, Homo sapiens
gaggagggtga

SEQ ID NO: 5061 - DNA, 11 bp, Homo sapiens
gtcacagtcct

SEQ ID NO: 5062 - DNA, 11 bp, Homo sapiens
gatgccctcct

SEQ ID NO: 5063 - DNA, 11 bp, Homo sapiens
gccagacccct

SEQ ID NO: 5064 - DNA, 11 bp, Homo sapiens
tgcctgtggcc

SEQ ID NO: 5065 - DNA, 11 bp, Homo sapiens
ggaagagcact

SEQ ID NO: 5066 - DNA, 11 bp, Homo sapiens
ccctctgtgat

SEQ ID NO: 5067 - DNA, 11 bp, Homo sapiens
attggctgggc

SEQ ID NO: 5068 - DNA, 11 bp, Homo sapiens
gcattgagtgt

SEQ ID NO: 5069 - DNA, 11 bp, Homo sapiens
tttccacttaa

SEQ ID NO: 5070 - DNA, 11 bp, Homo sapiens
cggcacatcca

SEQ ID NO: 5071 - DNA, 11 bp, Homo sapiens
ataccagatac

SEQ ID NO: 5072 - DNA, 11 bp, Homo sapiens
aagcaccttga

SEQ ID NO: 5073 - DNA, 11 bp, Homo sapiens
ggggtcccaaa

SEQ ID NO: 5074 - DNA, 11 bp, Homo sapiens
tgtgaaaataa

SEQ ID NO: 5075 - DNA, 11 bp, Homo sapiens
tcaagaaataa

SEQ ID NO: 5076 - DNA, 11 bp, Homo sapiens
ctggtacctgt

SEQ ID NO: 5077 - DNA, 11 bp, Homo sapiens
actcatctgac

SEQ ID NO: 5078 - DNA, 11 bp, Homo sapiens
aggtatggaga

SEQ ID NO: 5079 - DNA, 11 bp, Homo sapiens
ggcacacctta

SEQ ID NO: 5080 - DNA, 11 bp, Homo sapiens
attgtagacaa

SEQ ID NO: 5081 - DNA, 11 bp, Homo sapiens
gtcatatttcc

SEQ ID NO: 5082 - DNA, 11 bp, Homo sapiens
ttggaggagag

SEQ ID NO: 5083 - DNA, 11 bp, Homo sapiens
agagcaggtac

SEQ ID NO: 5084 - DNA, 11 bp, Homo sapiens
tgggtctggat

SEQ ID NO: 5085 - DNA, 11 bp, Homo sapiens
tggagagaata

SEQ ID NO: 5086 - DNA, 11 bp, Homo sapiens
cccaggagcag

SEQ ID NO: 5087 - DNA, 11 bp, Homo sapiens
acactaagacg

SEQ ID NO: 5088 - DNA, 11 bp, Homo sapiens
gtcagaacacc

SEQ ID NO: 5089 - DNA, 11 bp, Homo sapiens
gtataaacgaa

SEQ ID NO: 5090 - DNA, 11 bp, Homo sapiens
ccccctcctta

SEQ ID NO: 5091 - DNA, 11 bp, Homo sapiens
gaaatgtatgc

SEQ ID NO: 5092 - DNA, 11 bp, Homo sapiens
tcctctcacca

SEQ ID NO: 5093 - DNA, 11 bp, Homo sapiens
gtgctacttct

SEQ ID NO: 5094 - DNA, 11 bp, Homo sapiens
aattccaactc

SEQ ID NO: 5095 - DNA, 11 bp, Homo sapiens
agctcccagat

SEQ ID NO: 5096 - DNA, 11 bp, Homo sapiens
tgtgagggcat

SEQ ID NO: 5097 - DNA, 11 bp, Homo sapiens
ttccctgtgta

SEQ ID NO: 5098 - DNA, 11 bp, Homo sapiens
tgcctctgcgg

SEQ ID NO: 5099 - DNA, 11 bp, Homo sapiens
gtaaaaaaaaa

SEQ ID NO: 5100 - DNA, 11 bp, Homo sapiens
gaacgcctaat

SEQ ID NO: 5101 - DNA, 11 bp, Homo sapiens
tcagacgcagc

SEQ ID NO: 5102 - DNA, 11 bp, Homo sapiens
agctgtctcaa

SEQ ID NO: 5103 - DNA, 11 bp, Homo sapiens
acgacaaagct

SEQ ID NO: 5104 - DNA, 11 bp, Homo sapiens
cccttctgcca

SEQ ID NO: 5105 - DNA, 11 bp, Homo sapiens
atagctggggc

SEQ ID NO: 5106 - DNA, 11 bp, Homo sapiens
gtttcaggagt

SEQ ID NO: 5107 - DNA, 11 bp, Homo sapiens
cctgtgtgcat

SEQ ID NO: 5108 - DNA, 11 bp, Homo sapiens
cccccaatgct

SEQ ID NO: 5109 - DNA, 11 bp, Homo sapiens
ggaccactgaa

SEQ ID NO: 5110 - DNA, 11 bp, Homo sapiens
tttaaaaaaaa

SEQ ID NO: 5111 - DNA, 11 bp, Homo sapiens
gggcaggggaa

SEQ ID NO: 5112 - DNA, 11 bp, Homo sapiens
ttgagagatga

SEQ ID NO: 5113 - DNA, 11 bp, Homo sapiens
aagcaaaaggt

SEQ ID NO: 5114 - DNA, 11 bp, Homo sapiens
tgaaaagctta

SEQ ID NO: 5115 - DNA, 11 bp, Homo sapiens
gctctgttcat

SEQ ID NO: 5116 - DNA, 11 bp, Homo sapiens
ttgaagtggtt

SEQ ID NO: 5117 - DNA, 11 bp, Homo sapiens
cggagccggct

SEQ ID NO: 5118 - DNA, 11 bp, Homo sapiens
gtctgacccca

SEQ ID NO: 5119 - DNA, 11 bp, Homo sapiens
cgaccccacgc

SEQ ID NO: 5120 - DNA, 11 bp, Homo sapiens
tacataattac

SEQ ID NO: 5121 - DNA, 11 bp, Homo sapiens
gctgaagatga

SEQ ID NO: 5122 - DNA, 11 bp, Homo sapiens
tgctgtgcata

SEQ ID NO: 5123 - DNA, 11 bp, Homo sapiens
cagcccaaccg

SEQ ID NO: 5124 - DNA, 11 bp, Homo sapiens
ccctgggttct

SEQ ID NO: 5125 - DNA, 11 bp, Homo sapiens
ctgtggccgga

SEQ ID NO: 5126 - DNA, 11 bp, Homo sapiens
cctgtaaagcc

SEQ ID NO: 5127 - DNA, 11 bp, Homo sapiens
gcttttcctgt

SEQ ID NO: 5128 - DNA, 11 bp, Homo sapiens
accctgggcac

SEQ ID NO: 5129 - DNA, 11 bp, Homo sapiens
gcagagccttg

SEQ ID NO: 5130 - DNA, 11 bp, Homo sapiens
aatatctgact

SEQ ID NO: 5131 - DNA, 11 bp, Homo sapiens
gacatcctgtc

SEQ ID NO: 5132 - DNA, 11 bp, Homo sapiens
atttagaccag

SEQ ID NO: 5133 - DNA, 11 bp, Homo sapiens
tgctgtgacca

SEQ ID NO: 5134 - DNA, 11 bp, Homo sapiens
atcgtggagga

SEQ ID NO: 5135 - DNA, 11 bp, Homo sapiens
tattcaattac

SEQ ID NO: 5136 - DNA, 11 bp, Homo sapiens
tctttgtctaa

SEQ ID NO: 5137 - DNA, 11 bp, Homo sapiens
gccaaagtgtt

SEQ ID NO: 5138 - DNA, 11 bp, Homo sapiens
gatccaaatgt

SEQ ID NO: 5139 - DNA, 11 bp, Homo sapiens
gaggcttaata

SEQ ID NO: 5140 - DNA, 11 bp, Homo sapiens
aggggagagga

SEQ ID NO: 5141 - DNA, 11 bp, Homo sapiens
agagaaaaaaa

SEQ ID NO: 5142 - DNA, 11 bp, Homo sapiens
gatgttgtcca

SEQ ID NO: 5143 - DNA, 11 bp, Homo sapiens
cccaatactct

SEQ ID NO: 5144 - DNA, 11 bp, Homo sapiens
gaaattggtct

SEQ ID NO: 5145 - DNA, 11 bp, Homo sapiens
aacgagtattc

SEQ ID NO: 5146 - DNA, 11 bp, Homo sapiens
tgccaaaaaaa

SEQ ID NO: 5147 - DNA, 11 bp, Homo sapiens
ggtgcacccgg

SEQ ID NO: 5148 - DNA, 11 bp, Homo sapiens
tctagcatttc

SEQ ID NO: 5149 - DNA, 11 bp, Homo sapiens
agctttgtaga

SEQ ID NO: 5150 - DNA, 11 bp, Homo sapiens
cccaaggtctt

SEQ ID NO: 5151 - DNA, 11 bp, Homo sapiens
aaccaatacag

SEQ ID NO: 5152 - DNA, 11 bp, Homo sapiens
ctttttaaatc

SEQ ID NO: 5153 - DNA, 11 bp, Homo sapiens
gctcctgagcc

SEQ ID NO: 5154 - DNA, 11 bp, Homo sapiens
gagaaacattt

SEQ ID NO: 5155 - DNA, 11 bp, Homo sapiens
caaaatgcaaa

SEQ ID NO: 5156 - DNA, 11 bp, Homo sapiens
tggaatgctgg

SEQ ID NO: 5157 - DNA, 11 bp, Homo sapiens
accttgtgccc

SEQ ID NO: 5158 - DNA, 11 bp, Homo sapiens
tggagtggagg

SEQ ID NO: 5159 - DNA, 11 bp, Homo sapiens
ctccacaaatt

SEQ ID NO: 5160 - DNA, 11 bp, Homo sapiens
agaaatcactg

SEQ ID NO: 5161 - DNA, 11 bp, Homo sapiens
tgcaggtgtgt

SEQ ID NO: 5162 - DNA, 11 bp, Homo sapiens
cctgcagtccc

SEQ ID NO: 5163 - DNA, 11 bp, Homo sapiens
cccaaactttg

SEQ ID NO: 5164 - DNA, 11 bp, Homo sapiens
gggtgcaaaaa

SEQ ID NO: 5165 - DNA, 11 bp, Homo sapiens
ctatcagtttt

SEQ ID NO: 5166 - DNA, 11 bp, Homo sapiens
attctccagta

SEQ ID NO: 5167 - DNA, 11 bp, Homo sapiens
gcaaagaaaaa

SEQ ID NO: 5168 - DNA, 11 bp, Homo sapiens
atgagctgacc

SEQ ID NO: 5169 - DNA, 11 bp, Homo sapiens
taatttgcatt

SEQ ID NO: 5170 - DNA, 11 bp, Homo sapiens
aaacactcttg

SEQ ID NO: 5171 - DNA, 11 bp, Homo sapiens
ccaacaagaat

SEQ ID NO: 5172 - DNA, 11 bp, Homo sapiens
ttaaaggccgg

SEQ ID NO: 5173 - DNA, 11 bp, Homo sapiens
gccgagaccaa

SEQ ID NO: 5174 - DNA, 11 bp, Homo sapiens
gtttaagttaa

SEQ ID NO: 5175 - DNA, 11 bp, Homo sapiens
ccttgctttta

SEQ ID NO: 5176 - DNA, 11 bp, Homo sapiens
tgaggacacag

SEQ ID NO: 5177 - DNA, 11 bp, Homo sapiens
ttgggaatccc

SEQ ID NO: 5178 - DNA, 11 bp, Homo sapiens
catttttcccc

SEQ ID NO: 5179 - DNA, 11 bp, Homo sapiens
actcaaatctt

SEQ ID NO: 5180 - DNA, 11 bp, Homo sapiens
taattttaact

SEQ ID NO: 5181 - DNA, 11 bp, Homo sapiens
caggtgtcttt

SEQ ID NO: 5182 - DNA, 11 bp, Homo sapiens
actggtgagag

SEQ ID NO: 5183 - DNA, 11 bp, Homo sapiens
aaaataaagct

SEQ ID NO: 5184 - DNA, 11 bp, Homo sapiens
actcactgcag

SEQ ID NO: 5185 - DNA, 11 bp, Homo sapiens
ttaaaattgcc

SEQ ID NO: 5186 - DNA, 11 bp, Homo sapiens
aaccaggtgga

SEQ ID NO: 5187 - DNA, 11 bp, Homo sapiens
taggtcaggac

SEQ ID NO: 5188 - DNA, 11 bp, Homo sapiens
gtggcggcacc

SEQ ID NO: 5189 - DNA, 11 bp, Homo sapiens
cccacaacccg

SEQ ID NO: 5190 - DNA, 11 bp, Homo sapiens
gaattgagctt

SEQ ID NO: 5191 - DNA, 11 bp, Homo sapiens
tgttctttgca

SEQ ID NO: 5192 - DNA, 11 bp, Homo sapiens
gcttcctctgc

SEQ ID NO: 5193 - DNA, 11 bp, Homo sapiens
ggatacaacac

SEQ ID NO: 5194 - DNA, 11 bp, Homo sapiens
gtagtcaccgc

SEQ ID NO: 5195 - DNA, 11 bp, Homo sapiens
gcacaagagtg

SEQ ID NO: 5196 - DNA, 11 bp, Homo sapiens
gcctccagcct

SEQ ID NO: 5197 - DNA, 11 bp, Homo sapiens
taaacattgtc

SEQ ID NO: 5198 - DNA, 11 bp, Homo sapiens
caaattacaat

SEQ ID NO: 5199 - DNA, 11 bp, Homo sapiens
cttacagccac

SEQ ID NO: 5200 - DNA, 11 bp, Homo sapiens
actgcaccact

SEQ ID NO: 5201 - DNA, 11 bp, Homo sapiens
ttacaatgctg

SEQ ID NO: 5202 - DNA, 11 bp, Homo sapiens
tcctacggaaa

SEQ ID NO: 5203 - DNA, 11 bp, Homo sapiens
gctgttcattg

SEQ ID NO: 5204 - DNA, 11 bp, Homo sapiens
atataatctga

SEQ ID NO: 5205 - DNA, 11 bp, Homo sapiens
ctaataaactt

SEQ ID NO: 5206 - DNA, 11 bp, Homo sapiens
caggatccaga

SEQ ID NO: 5207 - DNA, 11 bp, Homo sapiens
cggataaccag

SEQ ID NO: 5208 - DNA, 11 bp, Homo sapiens
gtgtatctttt

SEQ ID NO: 5209 - DNA, 11 bp, Homo sapiens
ctccacctggt

SEQ ID NO: 5210 - DNA, 11 bp, Homo sapiens
tcaactggttc

SEQ ID NO: 5211 - DNA, 11 bp, Homo sapiens
aaattttaaaa

SEQ ID NO: 5212 - DNA, 11 bp, Homo sapiens
acccacagtgc

SEQ ID NO: 5213 - DNA, 11 bp, Homo sapiens
aggcctgggcc

SEQ ID NO: 5214 - DNA, 11 bp, Homo sapiens
tcagtgcgcag

SEQ ID NO: 5215 - DNA, 11 bp, Homo sapiens
ctgaggtgatg

SEQ ID NO: 5216 - DNA, 11 bp, Homo sapiens
ccactccactc

SEQ ID NO: 5217 - DNA, 11 bp, Homo sapiens
gcctgctccct

SEQ ID NO: 5218 - DNA, 11 bp, Homo sapiens
gactgtgccac

SEQ ID NO: 5219 - DNA, 11 bp, Homo sapiens
tgatctccaaa

SEQ ID NO: 5220 - DNA, 11 bp, Homo sapiens
aagaaagttct

SEQ ID NO: 5221 - DNA, 11 bp, Homo sapiens
taacagaaagg

SEQ ID NO: 5222 - DNA, 11 bp, Homo sapiens
atggctaagct

SEQ ID NO: 5223 - DNA, 11 bp, Homo sapiens
gatggggacaa

SEQ ID NO: 5224 - DNA, 11 bp, Homo sapiens
aattcaattaa

SEQ ID NO: 5225 - DNA, 11 bp, Homo sapiens
agcaaactgaa

SEQ ID NO: 5226 - DNA, 11 bp, Homo sapiens
cctcggaaaat

SEQ ID NO: 5227 - DNA, 11 bp, Homo sapiens
atggcccatac

SEQ ID NO: 5228 - DNA, 11 bp, Homo sapiens
caccacgggcc

SEQ ID NO: 5229 - DNA, 11 bp, Homo sapiens
cggataaggcc

SEQ ID NO: 5230 - DNA, 11 bp, Homo sapiens
ccttgggccta

SEQ ID NO: 5231 - DNA, 11 bp, Homo sapiens
tataacttgta

SEQ ID NO: 5232 - DNA, 11 bp, Homo sapiens
gcaccttattg

SEQ ID NO: 5233 - DNA, 11 bp, Homo sapiens
cacatctctga

SEQ ID NO: 5234 - DNA, 11 bp, Homo sapiens
ccttgtccagc

SEQ ID NO: 5235 - DNA, 11 bp, Homo sapiens
agctggtttcc

SEQ ID NO: 5236 - DNA, 11 bp, Homo sapiens
ttccctcgtga

SEQ ID NO: 5237 - DNA, 11 bp, Homo sapiens
cgcaccattgc

SEQ ID NO: 5238 - DNA, 11 bp, Homo sapiens
atattctgcct

SEQ ID NO: 5239 - DNA, 11 bp, Homo sapiens
ctcccaagctc

SEQ ID NO: 5240 - DNA, 11 bp, Homo sapiens
caagcttggtc

SEQ ID NO: 5241 - DNA, 11 bp, Homo sapiens
gtcatcactgg

SEQ ID NO: 5242 - DNA, 11 bp, Homo sapiens
ccctgttcagc

SEQ ID NO: 5243 - DNA, 11 bp, Homo sapiens
gactggaaaaa

SEQ ID NO: 5244 - DNA, 11 bp, Homo sapiens
gacccttctcc

SEQ ID NO: 5245 - DNA, 11 bp, Homo sapiens
ggcaggagtag

SEQ ID NO: 5246 - DNA, 11 bp, Homo sapiens
tgctaggaagg

SEQ ID NO: 5247 - DNA, 11 bp, Homo sapiens
tgttgtatttg

SEQ ID NO: 5248 - DNA, 11 bp, Homo sapiens
gtggcacccgc

SEQ ID NO: 5249 - DNA, 11 bp, Homo sapiens
aaactcacgcc

SEQ ID NO: 5250 - DNA, 11 bp, Homo sapiens
tgtatggctgg

SEQ ID NO: 5251 - DNA, 11 bp, Homo sapiens
gcttaaattaa

SEQ ID NO: 5252 - DNA, 11 bp, Homo sapiens
agaagatttat

SEQ ID NO: 5253 - DNA, 11 bp, Homo sapiens
acctggcctga

SEQ ID NO: 5254 - DNA, 11 bp, Homo sapiens
ctgtacatact

SEQ ID NO: 5255 - DNA, 11 bp, Homo sapiens
atgctggggag

SEQ ID NO: 5256 - DNA, 11 bp, Homo sapiens
gcaataatggt

SEQ ID NO: 5257 - DNA, 11 bp, Homo sapiens
gctggccggaa

SEQ ID NO: 5258 - DNA, 11 bp, Homo sapiens
cgctggttccc

SEQ ID NO: 5259 - DNA, 11 bp, Homo sapiens
caggggctggg

SEQ ID NO: 5260 - DNA, 11 bp, Homo sapiens
cgtttaatcat

SEQ ID NO: 5261 - DNA, 11 bp, Homo sapiens
ctcccaggtca

SEQ ID NO: 5262 - DNA, 11 bp, Homo sapiens
agccctcaaca

SEQ ID NO: 5263 - DNA, 11 bp, Homo sapiens
gactgaatgta

SEQ ID NO: 5264 - DNA, 11 bp, Homo sapiens
gtaatgcatat

SEQ ID NO: 5265 - DNA, 11 bp, Homo sapiens
gtgagggcaca

SEQ ID NO: 5266 - DNA, 11 bp, Homo sapiens
ccctggcaatg

SEQ ID NO: 5267 - DNA, 11 bp, Homo sapiens
acgcagggaga

SEQ ID NO: 5268 - DNA, 11 bp, Homo sapiens
cccgggagcga

SEQ ID NO: 5269 - DNA, 11 bp, Homo sapiens
gaggccatccc

SEQ ID NO: 5270 - DNA, 11 bp, Homo sapiens
ggctggtctcc

SEQ ID NO: 5271 - DNA, 11 bp, Homo sapiens
gagggccttgt

SEQ ID NO: 5272 - DNA, 11 bp, Homo sapiens
gtgacagaatt

SEQ ID NO: 5273 - DNA, 11 bp, Homo sapiens
cttttcacttc

SEQ ID NO: 5274 - DNA, 11 bp, Homo sapiens
tgtgttgtgtc

SEQ ID NO: 5275 - DNA, 11 bp, Homo sapiens
tggggtggagt

SEQ ID NO: 5276 - DNA, 11 bp, Homo sapiens
gattcaaccaa

SEQ ID NO: 5277 - DNA, 11 bp, Homo sapiens
ccgtcatcctg

SEQ ID NO: 5278 - DNA, 11 bp, Homo sapiens
agctgagctaa

SEQ ID NO: 5279 - DNA, 11 bp, Homo sapiens
caataaatgtt

SEQ ID NO: 5280 - DNA, 11 bp, Homo sapiens
gcagggcctca

SEQ ID NO: 5281 - DNA, 11 bp, Homo sapiens
cagttacttag

SEQ ID NO: 5282 - DNA, 11 bp, Homo sapiens
ttcctggtagt

SEQ ID NO: 5283 - DNA, 11 bp, Homo sapiens
gttttcattca

SEQ ID NO: 5284 - DNA, 11 bp, Homo sapiens
ccctcctctcc

SEQ ID NO: 5285 - DNA, 11 bp, Homo sapiens
tccctggcaga

SEQ ID NO: 5286 - DNA, 11 bp, Homo sapiens
gacacgaacaa

SEQ ID NO: 5287 - DNA, 11 bp, Homo sapiens
ctgggatgtcg

SEQ ID NO: 5288 - DNA, 11 bp, Homo sapiens
gtgttctgact

SEQ ID NO: 5289 - DNA, 11 bp, Homo sapiens
gctatgctccc

SEQ ID NO: 5290 - DNA, 11 bp, Homo sapiens
gcccctcagca

SEQ ID NO: 5291 - DNA, 11 bp, Homo sapiens
ccccctgccct

SEQ ID NO: 5292 - DNA, 11 bp, Homo sapiens
agaaagatgtc

SEQ ID NO: 5293 - DNA, 11 bp, Homo sapiens
tttacagctgg

SEQ ID NO: 5294 - DNA, 11 bp, Homo sapiens
gttgtaaaata

SEQ ID NO: 5295 - DNA, 11 bp, Homo sapiens
ctgcctcctta

SEQ ID NO: 5296 - DNA, 11 bp, Homo sapiens
tcaccttcaag

SEQ ID NO: 5297 - DNA, 11 bp, Homo sapiens
ttttataagga

SEQ ID NO: 5298 - DNA, 11 bp, Homo sapiens
ccttgtcctct

SEQ ID NO: 5299 - DNA, 11 bp, Homo sapiens
agtgtttgtag

SEQ ID NO: 5300 - DNA, 11 bp, Homo sapiens
agaacaaaggc

SEQ ID NO: 5301 - DNA, 11 bp, Homo sapiens
ggcaaaaaaaa

SEQ ID NO: 5302 - DNA, 11 bp, Homo sapiens
gcctccacagc

SEQ ID NO: 5303 - DNA, 11 bp, Homo sapiens
gcacaagttct

SEQ ID NO: 5304 - DNA, 11 bp, Homo sapiens
gttgggtagaa

SEQ ID NO: 5305 - DNA, 11 bp, Homo sapiens
aggtcaggaaa

SEQ ID NO: 5306 - DNA, 11 bp, Homo sapiens
gtcattttcta

SEQ ID NO: 5307 - DNA, 11 bp, Homo sapiens
tcttccctcag

SEQ ID NO: 5308 - DNA, 11 bp, Homo sapiens
ggttgatcacc

SEQ ID NO: 5309 - DNA, 11 bp, Homo sapiens
tttcaagtggt

SEQ ID NO: 5310 - DNA, 11 bp, Homo sapiens
ccgggttattt

SEQ ID NO: 5311 - DNA, 11 bp, Homo sapiens
ccgcccccagc

SEQ ID NO: 5312 - DNA, 11 bp, Homo sapiens
gtgttgactgc

SEQ ID NO: 5313 - DNA, 11 bp, Homo sapiens
tgaaacggaag

SEQ ID NO: 5314 - DNA, 11 bp, Homo sapiens
gtgctcagcct

SEQ ID NO: 5315 - DNA, 11 bp, Homo sapiens
acctggtgtct

SEQ ID NO: 5316 - DNA, 11 bp, Homo sapiens
gcagagaaaaa

SEQ ID NO: 5317 - DNA, 11 bp, Homo sapiens
taagtgactgt

SEQ ID NO: 5318 - DNA, 11 bp, Homo sapiens
cacagagtcct

SEQ ID NO: 5319 - DNA, 11 bp, Homo sapiens
taaactgtttc

SEQ ID NO: 5320 - DNA, 11 bp, Homo sapiens
ttcacagattt

SEQ ID NO: 5321 - DNA, 11 bp, Homo sapiens
agctgatcagc

SEQ ID NO: 5322 - DNA, 11 bp, Homo sapiens
ttcattgtaga

SEQ ID NO: 5323 - DNA, 11 bp, Homo sapiens
tgccatctgta

SEQ ID NO: 5324 - DNA, 11 bp, Homo sapiens
gcctcctgtca

SEQ ID NO: 5325 - DNA, 11 bp, Homo sapiens
cactgtgacct

SEQ ID NO: 5326 - DNA, 11 bp, Homo sapiens
gggctgctctt

SEQ ID NO: 5327 - DNA, 11 bp, Homo sapiens
cccaggacacc

SEQ ID NO: 5328 - DNA, 11 bp, Homo sapiens
atgttgcccct

SEQ ID NO: 5329 - DNA, 11 bp, Homo sapiens
tgctaaaaaaa

SEQ ID NO: 5330 - DNA, 11 bp, Homo sapiens
ggggagggggc

SEQ ID NO: 5331 - DNA, 11 bp, Homo sapiens
gccagacaccc

SEQ ID NO: 5332 - DNA, 11 bp, Homo sapiens
tactcttggca

SEQ ID NO: 5333 - DNA, 11 bp, Homo sapiens
taggcccaagt

SEQ ID NO: 5334 - DNA, 11 bp, Homo sapiens
ccaaccgtgct

SEQ ID NO: 5335 - DNA, 11 bp, Homo sapiens
ggtgaccacca

SEQ ID NO: 5336 - DNA, 11 bp, Homo sapiens
gcatttgacag

SEQ ID NO: 5337 - DNA, 11 bp, Homo sapiens
ggtgcggctgg

SEQ ID NO: 5338 - DNA, 11 bp, Homo sapiens
ttgtgattaat

SEQ ID NO: 5339 - DNA, 11 bp, Homo sapiens
ggagagacagg

SEQ ID NO: 5340 - DNA, 11 bp, Homo sapiens
tcagtttgtca

SEQ ID NO: 5341 - DNA, 11 bp, Homo sapiens
gtgcctaggga

SEQ ID NO: 5342 - DNA, 11 bp, Homo sapiens
agtatctggga

SEQ ID NO: 5343 - DNA, 11 bp, Homo sapiens
tcaatcaagat

SEQ ID NO: 5344 - DNA, 11 bp, Homo sapiens
tggctgggaaa

SEQ ID NO: 5345 - DNA, 11 bp, Homo sapiens
taagaagcccc

SEQ ID NO: 5346 - DNA, 11 bp, Homo sapiens
caggcactgaa

SEQ ID NO: 5347 - DNA, 11 bp, Homo sapiens
gggtttttctg

SEQ ID NO: 5348 - DNA, 11 bp, Homo sapiens
gagaagacacg

SEQ ID NO: 5349 - DNA, 11 bp, Homo sapiens
tgcagaagtag

SEQ ID NO: 5350 - DNA, 11 bp, Homo sapiens
ttgtccgggct

SEQ ID NO: 5351 - DNA, 11 bp, Homo sapiens
gattttaatgt

SEQ ID NO: 5352 - DNA, 11 bp, Homo sapiens
cctcttgtaat

SEQ ID NO: 5353 - DNA, 11 bp, Homo sapiens
ccctggctgta

SEQ ID NO: 5354 - DNA, 11 bp, Homo sapiens
tgatgtggaat

SEQ ID NO: 5355 - DNA, 11 bp, Homo sapiens
aaatgactata

SEQ ID NO: 5356 - DNA, 11 bp, Homo sapiens
gaggttagatt

SEQ ID NO: 5357 - DNA, 11 bp, Homo sapiens
atgctgtctgc

SEQ ID NO: 5358 - DNA, 11 bp, Homo sapiens
agttgagtcct

SEQ ID NO: 5359 - DNA, 11 bp, Homo sapiens
ccccactaaac

SEQ ID NO: 5360 - DNA, 11 bp, Homo sapiens
tgcttgtggtt

SEQ ID NO: 5361 - DNA, 11 bp, Homo sapiens
tacgggggcca

SEQ ID NO: 5362 - DNA, 11 bp, Homo sapiens
ccgtgaaaaaa

SEQ ID NO: 5363 - DNA, 11 bp, Homo sapiens
taacaaacctg

SEQ ID NO: 5364 - DNA, 11 bp, Homo sapiens
tttctgtgaac

SEQ ID NO: 5365 - DNA, 11 bp, Homo sapiens
caaatatcttg

SEQ ID NO: 5366 - DNA, 11 bp, Homo sapiens
gatgtgaaaag

SEQ ID NO: 5367 - DNA, 11 bp, Homo sapiens
gccacgtggag

SEQ ID NO: 5368 - DNA, 11 bp, Homo sapiens
cacaaacggta

SEQ ID NO: 5369 - DNA, 11 bp, Homo sapiens
cggaggtggga

SEQ ID NO: 5370 - DNA, 11 bp, Homo sapiens
atggtggtggc

SEQ ID NO: 5371 - DNA, 11 bp, Homo sapiens
gcatattaaaa

SEQ ID NO: 5372 - DNA, 11 bp, Homo sapiens
ggtgagacctg

SEQ ID NO: 5373 - DNA, 11 bp, Homo sapiens
acgccctgctc

SEQ ID NO: 5374 - DNA, 11 bp, Homo sapiens
aggacttctga

SEQ ID NO: 5375 - DNA, 11 bp, Homo sapiens
atccgtgccct

SEQ ID NO: 5376 - DNA, 11 bp, Homo sapiens
aaaagaaactt

SEQ ID NO: 5377 - DNA, 11 bp, Homo sapiens
ggtggatgtgc

SEQ ID NO: 5378 - DNA, 11 bp, Homo sapiens
gtaggggcctc

SEQ ID NO: 5379 - DNA, 11 bp, Homo sapiens
taatttgaaaa

SEQ ID NO: 5380 - DNA, 11 bp, Homo sapiens
aggccacctca

SEQ ID NO: 5381 - DNA, 11 bp, Homo sapiens
actcttgttgg

SEQ ID NO: 5382 - DNA, 11 bp, Homo sapiens
tggaagctttc

SEQ ID NO: 5383 - DNA, 11 bp, Homo sapiens
atacataataa

SEQ ID NO: 5384 - DNA, 11 bp, Homo sapiens
gggccgctcag

SEQ ID NO: 5385 - DNA, 11 bp, Homo sapiens
taccaagccag

SEQ ID NO: 5386 - DNA, 11 bp, Homo sapiens
aatgcgggaaa

SEQ ID NO: 5387 - DNA, 11 bp, Homo sapiens
aggctttatgg

SEQ ID NO: 5388 - DNA, 11 bp, Homo sapiens
tgatgagtgct

SEQ ID NO: 5389 - DNA, 11 bp, Homo sapiens
taaaaccctat

SEQ ID NO: 5390 - DNA, 11 bp, Homo sapiens
gccacagccag

SEQ ID NO: 5391 - DNA, 11 bp, Homo sapiens
gggctccagga

SEQ ID NO: 5392 - DNA, 11 bp, Homo sapiens
agcggagtctg

SEQ ID NO: 5393 - DNA, 11 bp, Homo sapiens
cttatggtccc

SEQ ID NO: 5394 - DNA, 11 bp, Homo sapiens
gaagtcatttt

SEQ ID NO: 5395 - DNA, 11 bp, Homo sapiens
tgtttggtttc

SEQ ID NO: 5396 - DNA, 11 bp, Homo sapiens
agagctcacta

SEQ ID NO: 5397 - DNA, 11 bp, Homo sapiens
cctgtaaatcc

SEQ ID NO: 5398 - DNA, 11 bp, Homo sapiens
agctgttctgc

SEQ ID NO: 5399 - DNA, 11 bp, Homo sapiens
gaggccagtga

SEQ ID NO: 5400 - DNA, 11 bp, Homo sapiens
tgtaatcaata

SEQ ID NO: 5401 - DNA, 11 bp, Homo sapiens
gatatcagtct

SEQ ID NO: 5402 - DNA, 11 bp, Homo sapiens
cttctgctggg

SEQ ID NO: 5403 - DNA, 11 bp, Homo sapiens
aactgcttcaa

SEQ ID NO: 5404 - DNA, 11 bp, Homo sapiens
acggtgatgtc

SEQ ID NO: 5405 - DNA, 11 bp, Homo sapiens
gcctcctccca

SEQ ID NO: 5406 - DNA, 11 bp, Homo sapiens
gcccctgcctc

SEQ ID NO: 5407 - DNA, 11 bp, Homo sapiens
tgcggaggccc

SEQ ID NO: 5408 - DNA, 11 bp, Homo sapiens
cttatggttga

SEQ ID NO: 5409 - DNA, 11 bp, Homo sapiens
taatacttttg

SEQ ID NO: 5410 - DNA, 11 bp, Homo sapiens
taagcattaaa

SEQ ID NO: 5411 - DNA, 11 bp, Homo sapiens
acagtgttaaa

SEQ ID NO: 5412 - DNA, 11 bp, Homo sapiens
tttgtgggcag

SEQ ID NO: 5413 - DNA, 11 bp, Homo sapiens
tggtccctctc

SEQ ID NO: 5414 - DNA, 11 bp, Homo sapiens
gtttctaataa

SEQ ID NO: 5415 - DNA, 11 bp, Homo sapiens
caattgtaaat

SEQ ID NO: 5416 - DNA, 11 bp, Homo sapiens
gcactttgagg

SEQ ID NO: 5417 - DNA, 11 bp, Homo sapiens
atcaagggtgt

SEQ ID NO: 5418 - DNA, 11 bp, Homo sapiens
aggggcgcaga

SEQ ID NO: 5419 - DNA, 11 bp, Homo sapiens
ggctgatgtgg

SEQ ID NO: 5420 - DNA, 11 bp, Homo sapiens
gcagccatccg

SEQ ID NO: 5421 - DNA, 11 bp, Homo sapiens
cttcctgtgat

SEQ ID NO: 5422 - DNA, 11 bp, Homo sapiens
aaggaagctgc

SEQ ID NO: 5423 - DNA, 11 bp, Homo sapiens
gtgttcctccg

SEQ ID NO: 5424 - DNA, 11 bp, Homo sapiens
acataataaag

SEQ ID NO: 5425 - DNA, 11 bp, Homo sapiens
acgtctctatt

SEQ ID NO: 5426 - DNA, 11 bp, Homo sapiens
ttgatgcccta

SEQ ID NO: 5427 - DNA, 11 bp, Homo sapiens
gacaccaacta

SEQ ID NO: 5428 - DNA, 11 bp, Homo sapiens
tgcccagcaaa

SEQ ID NO: 5429 - DNA, 11 bp, Homo sapiens
atacatactgt

SEQ ID NO: 5430 - DNA, 11 bp, Homo sapiens
gaggccaatgc

SEQ ID NO: 5431 - DNA, 11 bp, Homo sapiens
tctgcagggga

SEQ ID NO: 5432 - DNA, 11 bp, Homo sapiens
actactaaata

SEQ ID NO: 5433 - DNA, 11 bp, Homo sapiens
gctggttcctg

SEQ ID NO: 5434 - DNA, 11 bp, Homo sapiens
tgccatataag

SEQ ID NO: 5435 - DNA, 11 bp, Homo sapiens
acccaatttgt

SEQ ID NO: 5436 - DNA, 11 bp, Homo sapiens
accaaatattt

SEQ ID NO: 5437 - DNA, 11 bp, Homo sapiens
ggacagaaccc

SEQ ID NO: 5438 - DNA, 11 bp, Homo sapiens
gtgattatgat

SEQ ID NO: 5439 - DNA, 11 bp, Homo sapiens
tcacagtgcct

SEQ ID NO: 5440 - DNA, 11 bp, Homo sapiens
gctccactgga

SEQ ID NO: 5441 - DNA, 11 bp, Homo sapiens
gtgccctgttg

SEQ ID NO: 5442 - DNA, 11 bp, Homo sapiens
cccggggcctc

SEQ ID NO: 5443 - DNA, 11 bp, Homo sapiens
cacctgtcctt

SEQ ID NO: 5444 - DNA, 11 bp, Homo sapiens
ctggaggcaca

SEQ ID NO: 5445 - DNA, 11 bp, Homo sapiens
gagagggcaga

SEQ ID NO: 5446 - DNA, 11 bp, Homo sapiens
aatccgactct

SEQ ID NO: 5447 - DNA, 11 bp, Homo sapiens
cttttcagcaa

SEQ ID NO: 5448 - DNA, 11 bp, Homo sapiens
gggcgggggcg

SEQ ID NO: 5449 - DNA, 11 bp, Homo sapiens
gagcgcagcga

SEQ ID NO: 5450 - DNA, 11 bp, Homo sapiens
tcctgccctca

SEQ ID NO: 5451 - DNA, 11 bp, Homo sapiens
tgtgggaacca

SEQ ID NO: 5452 - DNA, 11 bp, Homo sapiens
ccagattttgg

SEQ ID NO: 5453 - DNA, 11 bp, Homo sapiens
atattgtcaaa

SEQ ID NO: 5454 - DNA, 11 bp, Homo sapiens
cactgcatatg

SEQ ID NO: 5455 - DNA, 11 bp, Homo sapiens
gagcataataa

SEQ ID NO: 5456 - DNA, 11 bp, Homo sapiens
cgccgccggct

SEQ ID NO: 5457 - DNA, 11 bp, Homo sapiens
ggggtgctgtg

SEQ ID NO: 5458 - DNA, 11 bp, Homo sapiens
aagccaggaca

SEQ ID NO: 5459 - DNA, 11 bp, Homo sapiens
tttctagtttg

SEQ ID NO: 5460 - DNA, 11 bp, Homo sapiens
ggcaacgtggt

SEQ ID NO: 5461 - DNA, 11 bp, Homo sapiens
aagacagtggc

SEQ ID NO: 5462 - DNA, 11 bp, Homo sapiens
gaggggaggaa

SEQ ID NO: 5463 - DNA, 11 bp, Homo sapiens
taaatgttgat

SEQ ID NO: 5464 - DNA, 11 bp, Homo sapiens
cctgccacccc

SEQ ID NO: 5465 - DNA, 11 bp, Homo sapiens
acactctcccc

SEQ ID NO: 5466 - DNA, 11 bp, Homo sapiens
ggagtaagggg

SEQ ID NO: 5467 - DNA, 11 bp, Homo sapiens
atcgcgacact

SEQ ID NO: 5468 - DNA, 11 bp, Homo sapiens
gcgaaaaaaaa

SEQ ID NO: 5469 - DNA, 11 bp, Homo sapiens
tgtgctgagag

SEQ ID NO: 5470 - DNA, 11 bp, Homo sapiens
cttttaggcct

SEQ ID NO: 5471 - DNA, 11 bp, Homo sapiens
cctgtactccc

SEQ ID NO: 5472 - DNA, 11 bp, Homo sapiens
cactcacacaa

SEQ ID NO: 5473 - DNA, 11 bp, Homo sapiens
tgtattcagca

SEQ ID NO: 5474 - DNA, 11 bp, Homo sapiens
tgggaaacctg

SEQ ID NO: 5475 - DNA, 11 bp, Homo sapiens
atgctgccaaa

SEQ ID NO: 5476 - DNA, 11 bp, Homo sapiens
ccagcagcttc

SEQ ID NO: 5477 - DNA, 11 bp, Homo sapiens
agacagtaata

SEQ ID NO: 5478 - DNA, 11 bp, Homo sapiens
tatttcagtga

SEQ ID NO: 5479 - DNA, 11 bp, Homo sapiens
tggctagattt

SEQ ID NO: 5480 - DNA, 11 bp, Homo sapiens
cactctggaat

SEQ ID NO: 5481 - DNA, 11 bp, Homo sapiens
ctgccctagta

SEQ ID NO: 5482 - DNA, 11 bp, Homo sapiens
aagctgagtgg

SEQ ID NO: 5483 - DNA, 11 bp, Homo sapiens
ttgctggagaa

SEQ ID NO: 5484 - DNA, 11 bp, Homo sapiens
gcagctaattt

SEQ ID NO: 5485 - DNA, 11 bp, Homo sapiens
agagcaagtac

SEQ ID NO: 5486 - DNA, 11 bp, Homo sapiens
cttgattaaac

SEQ ID NO: 5487 - DNA, 11 bp, Homo sapiens
gcccgcaagct

SEQ ID NO: 5488 - DNA, 11 bp, Homo sapiens
tgaaagtaaca

SEQ ID NO: 5489 - DNA, 11 bp, Homo sapiens
acatcatcgat

SEQ ID NO: 5490 - DNA, 11 bp, Homo sapiens
tttacaaagag

SEQ ID NO: 5491 - DNA, 11 bp, Homo sapiens
aagcccaggct

SEQ ID NO: 5492 - DNA, 11 bp, Homo sapiens
atccacatcgc

SEQ ID NO: 5493 - DNA, 11 bp, Homo sapiens
actggctgctg

SEQ ID NO: 5494 - DNA, 11 bp, Homo sapiens
tgtgtgtttgt

SEQ ID NO: 5495 - DNA, 11 bp, Homo sapiens
ttccccttcct

SEQ ID NO: 5496 - DNA, 11 bp, Homo sapiens
ggggaagggca

SEQ ID NO: 5497 - DNA, 11 bp, Homo sapiens
ccctgaatccc

SEQ ID NO: 5498 - DNA, 11 bp, Homo sapiens
aatgaacaata

SEQ ID NO: 5499 - DNA, 11 bp, Homo sapiens
gtttggcagtg

SEQ ID NO: 5500 - DNA, 11 bp, Homo sapiens
gaggcctcagc

SEQ ID NO: 5501 - DNA, 11 bp, Homo sapiens
ttctggctgcg

SEQ ID NO: 5502 - DNA, 11 bp, Homo sapiens
tggtacacgta

SEQ ID NO: 5503 - DNA, 11 bp, Homo sapiens
gagggccggtg

SEQ ID NO: 5504 - DNA, 11 bp, Homo sapiens
gaaaaaataaa

SEQ ID NO: 5505 - DNA, 11 bp, Homo sapiens
gttgtaaataa

SEQ ID NO: 5506 - DNA, 11 bp, Homo sapiens
aggtgcctcgg

SEQ ID NO: 5507 - DNA, 11 bp, Homo sapiens
ctttccttttc

SEQ ID NO: 5508 - DNA, 11 bp, Homo sapiens
atttttgccct

SEQ ID NO: 5509 - DNA, 11 bp, Homo sapiens
ttccaccaacc

SEQ ID NO: 5510 - DNA, 11 bp, Homo sapiens
taggagatttt

SEQ ID NO: 5511 - DNA, 11 bp, Homo sapiens
tggaagaatgg

SEQ ID NO: 5512 - DNA, 11 bp, Homo sapiens
ttcattatagg

SEQ ID NO: 5513 - DNA, 11 bp, Homo sapiens
ggcctgtgtga

SEQ ID NO: 5514 - DNA, 11 bp, Homo sapiens
aactaacattt

SEQ ID NO: 5515 - DNA, 11 bp, Homo sapiens
ctgtattaaaa

SEQ ID NO: 5516 - DNA, 11 bp, Homo sapiens
ttgctatgaaa

SEQ ID NO: 5517 - DNA, 11 bp, Homo sapiens
ttactctttct

SEQ ID NO: 5518 - DNA, 11 bp, Homo sapiens
acttatgttta

SEQ ID NO: 5519 - DNA, 11 bp, Homo sapiens
ctgttatagga

SEQ ID NO: 5520 - DNA, 11 bp, Homo sapiens
atggctcacac

SEQ ID NO: 5521 - DNA, 11 bp, Homo sapiens
ttttcccacca

SEQ ID NO: 5522 - DNA, 11 bp, Homo sapiens
tttctgaaaaa

SEQ ID NO: 5523 - DNA, 11 bp, Homo sapiens
gacctcactgt

SEQ ID NO: 5524 - DNA, 11 bp, Homo sapiens
gttttttttaa

SEQ ID NO: 5525 - DNA, 11 bp, Homo sapiens
ctgtccttgtg

SEQ ID NO: 5526 - DNA, 11 bp, Homo sapiens
ccaccccgaat

SEQ ID NO: 5527 - DNA, 11 bp, Homo sapiens
tatgacttaat

SEQ ID NO: 5528 - DNA, 11 bp, Homo sapiens
gccccagcgag

SEQ ID NO: 5529 - DNA, 11 bp, Homo sapiens
ctgaccggtgc

SEQ ID NO: 5530 - DNA, 11 bp, Homo sapiens
tgtgtgccact

SEQ ID NO: 5531 - DNA, 11 bp, Homo sapiens
aattgccactg

SEQ ID NO: 5532 - DNA, 11 bp, Homo sapiens
acaaaaaaaaa

SEQ ID NO: 5533 - DNA, 11 bp, Homo sapiens
tgaatgtcaag

SEQ ID NO: 5534 - DNA, 11 bp, Homo sapiens
tacgaagttct

SEQ ID NO: 5535 - DNA, 11 bp, Homo sapiens
ctgagtctccc

SEQ ID NO: 5536 - DNA, 11 bp, Homo sapiens
gaggcgatcag

SEQ ID NO: 5537 - DNA, 11 bp, Homo sapiens
gccccccactc

SEQ ID NO: 5538 - DNA, 11 bp, Homo sapiens
cactcgtgtga

SEQ ID NO: 5539 - DNA, 11 bp, Homo sapiens
ggagaagatga

SEQ ID NO: 5540 - DNA, 11 bp, Homo sapiens
tttggtctttt

SEQ ID NO: 5541 - DNA, 11 bp, Homo sapiens
gggggacggct

SEQ ID NO: 5542 - DNA, 11 bp, Homo sapiens
tagtccctctt

SEQ ID NO: 5543 - DNA, 11 bp, Homo sapiens
tatgcgtttgg

SEQ ID NO: 5544 - DNA, 11 bp, Homo sapiens
attttgtgtca

SEQ ID NO: 5545 - DNA, 11 bp, Homo sapiens
gactctggtgc

SEQ ID NO: 5546 - DNA, 11 bp, Homo sapiens
gcaggtcagcc

SEQ ID NO: 5547 - DNA, 11 bp, Homo sapiens
cagactttttt

SEQ ID NO: 5548 - DNA, 11 bp, Homo sapiens
ttcagttgctt

SEQ ID NO: 5549 - DNA, 11 bp, Homo sapiens
tagaaaccaga

SEQ ID NO: 5550 - DNA, 11 bp, Homo sapiens
actcgctctgt

SEQ ID NO: 5551 - DNA, 11 bp, Homo sapiens
ctgggttaata

SEQ ID NO: 5552 - DNA, 11 bp, Homo sapiens
ccgtccaaggg

SEQ ID NO: 5553 - DNA, 11 bp, Homo sapiens
gagtgaaagac

SEQ ID NO: 5554 - DNA, 11 bp, Homo sapiens
gagctccacag

SEQ ID NO: 5555 - DNA, 11 bp, Homo sapiens
aaagtggaaaa

SEQ ID NO: 5556 - DNA, 11 bp, Homo sapiens
aatgggggtta

SEQ ID NO: 5557 - DNA, 11 bp, Homo sapiens
ctttgcttttt

SEQ ID NO: 5558 - DNA, 11 bp, Homo sapiens
gtacgaatggc

SEQ ID NO: 5559 - DNA, 11 bp, Homo sapiens
tgaaggtggat

SEQ ID NO: 5560 - DNA, 11 bp, Homo sapiens
gaatgagcaac

SEQ ID NO: 5561 - DNA, 11 bp, Homo sapiens
gctgcaaagga

SEQ ID NO: 5562 - DNA, 11 bp, Homo sapiens
ctagattccct

SEQ ID NO: 5563 - DNA, 11 bp, Homo sapiens
tctgtaggctg

SEQ ID NO: 5564 - DNA, 11 bp, Homo sapiens
cagggctcgcg

SEQ ID NO: 5565 - DNA, 11 bp, Homo sapiens
cctgggtcctg

SEQ ID NO: 5566 - DNA, 11 bp, Homo sapiens
gagaggaaact

SEQ ID NO: 5567 - DNA, 11 bp, Homo sapiens
tggttctatat

SEQ ID NO: 5568 - DNA, 11 bp, Homo sapiens
tgcctatagcc

SEQ ID NO: 5569 - DNA, 11 bp, Homo sapiens
caccctgtaca

SEQ ID NO: 5570 - DNA, 11 bp, Homo sapiens
aaggagaatgg

SEQ ID NO: 5571 - DNA, 11 bp, Homo sapiens
cacgactgttc

SEQ ID NO: 5572 - DNA, 11 bp, Homo sapiens
atttttcttta

SEQ ID NO: 5573 - DNA, 11 bp, Homo sapiens
aatggttagcc

SEQ ID NO: 5574 - DNA, 11 bp, Homo sapiens
gtggcatcacc

SEQ ID NO: 5575 - DNA, 11 bp, Homo sapiens
agcacctccag

SEQ ID NO: 5576 - DNA, 11 bp, Homo sapiens
ccaaaattagg

SEQ ID NO: 5577 - DNA, 11 bp, Homo sapiens
tttgtgactgt

SEQ ID NO: 5578 - DNA, 11 bp, Homo sapiens
gtgcactgagc

SEQ ID NO: 5579 - DNA, 11 bp, Homo sapiens
ctcaaaaaaaa

SEQ ID NO: 5580 - DNA, 11 bp, Homo sapiens
ttggggaaaca

SEQ ID NO: 5581 - DNA, 11 bp, Homo sapiens
aggctgtgttc

SEQ ID NO: 5582 - DNA, 11 bp, Homo sapiens
ggggctgtggc

SEQ ID NO: 5583 - DNA, 11 bp, Homo sapiens
tgtgtgtgtgt

SEQ ID NO: 5584 - DNA, 11 bp, Homo sapiens
cttctgtctcc

SEQ ID NO: 5585 - DNA, 11 bp, Homo sapiens
aacgtgcaggg

SEQ ID NO: 5586 - DNA, 11 bp, Homo sapiens
gatagttgtgg

SEQ ID NO: 5587 - DNA, 11 bp, Homo sapiens
caaggatctac

SEQ ID NO: 5588 - DNA, 11 bp, Homo sapiens
atcaagttcga

SEQ ID NO: 5589 - DNA, 11 bp, Homo sapiens
caggggagtgg

SEQ ID NO: 5590 - DNA, 11 bp, Homo sapiens
ctccaataaaa

SEQ ID NO: 5591 - DNA, 11 bp, Homo sapiens
ccttatatttg

SEQ ID NO: 5592 - DNA, 11 bp, Homo sapiens
ttacgatgaat

SEQ ID NO: 5593 - DNA, 11 bp, Homo sapiens
ccacacaccgt

SEQ ID NO: 5594 - DNA, 11 bp, Homo sapiens
gactagtgcgt

SEQ ID NO: 5595 - DNA, 11 bp, Homo sapiens
gcagctcagat

SEQ ID NO: 5596 - DNA, 11 bp, Homo sapiens
actccagctga

SEQ ID NO: 5597 - DNA, 11 bp, Homo sapiens
gtgtcgcatct

SEQ ID NO: 5598 - DNA, 11 bp, Homo sapiens
tggaaaaaaaa

SEQ ID NO: 5599 - DNA, 11 bp, Homo sapiens
gtaatttaaac

SEQ ID NO: 5600 - DNA, 11 bp, Homo sapiens
cagtatcccag

SEQ ID NO: 5601 - DNA, 11 bp, Homo sapiens
aatcgctaata

SEQ ID NO: 5602 - DNA, 11 bp, Homo sapiens
ccagtttgtat

SEQ ID NO: 5603 - DNA, 11 bp, Homo sapiens
aataaaattag

SEQ ID NO: 5604 - DNA, 11 bp, Homo sapiens
aggagccttag

SEQ ID NO: 5605 - DNA, 11 bp, Homo sapiens
aatatggtaca

SEQ ID NO: 5606 - DNA, 11 bp, Homo sapiens
aatttacttcc

SEQ ID NO: 5607 - DNA, 11 bp, Homo sapiens
ccggttggcaa

SEQ ID NO: 5608 - DNA, 11 bp, Homo sapiens
tttggaaaaaa

SEQ ID NO: 5609 - DNA, 11 bp, Homo sapiens
gctcattaaag

SEQ ID NO: 5610 - DNA, 11 bp, Homo sapiens
tccacgcacca

SEQ ID NO: 5611 - DNA, 11 bp, Homo sapiens
acttacctgct

SEQ ID NO: 5612 - DNA, 11 bp, Homo sapiens
tctgcttacag

SEQ ID NO: 5613 - DNA, 11 bp, Homo sapiens
atgactcaagg

SEQ ID NO: 5614 - DNA, 11 bp, Homo sapiens
gatgaacactg

SEQ ID NO: 5615 - DNA, 11 bp, Homo sapiens
tcgcccaggcg

SEQ ID NO: 5616 - DNA, 11 bp, Homo sapiens
acaagaattgt

SEQ ID NO: 5617 - DNA, 11 bp, Homo sapiens
taccccaccct

SEQ ID NO: 5618 - DNA, 11 bp, Homo sapiens
agcctgcagaa

SEQ ID NO: 5619 - DNA, 11 bp, Homo sapiens
ggattccagtt

SEQ ID NO: 5620 - DNA, 11 bp, Homo sapiens
ggagtctaact

SEQ ID NO: 5621 - DNA, 11 bp, Homo sapiens
ggagtgtgcgt

SEQ ID NO: 5622 - DNA, 11 bp, Homo sapiens
gaaatccgcac

SEQ ID NO: 5623 - DNA, 11 bp, Homo sapiens
tctgtaacacc

SEQ ID NO: 5624 - DNA, 11 bp, Homo sapiens
ttctggcactg

SEQ ID NO: 5625 - DNA, 11 bp, Homo sapiens
ggctcaaaact

SEQ ID NO: 5626 - DNA, 11 bp, Homo sapiens
gtggccccggc

SEQ ID NO: 5627 - DNA, 11 bp, Homo sapiens
tctctgcctct

SEQ ID NO: 5628 - DNA, 11 bp, Homo sapiens
ttctgtagccc

SEQ ID NO: 5629 - DNA, 11 bp, Homo sapiens
aatggagactt

SEQ ID NO: 5630 - DNA, 11 bp, Homo sapiens
gagggccttca

SEQ ID NO: 5631 - DNA, 11 bp, Homo sapiens
gtgaggccccg

SEQ ID NO: 5632 - DNA, 11 bp, Homo sapiens
tacccacagag

SEQ ID NO: 5633 - DNA, 11 bp, Homo sapiens
ttaccgtcccc

SEQ ID NO: 5634 - DNA, 11 bp, Homo sapiens
ggaagatgatg

SEQ ID NO: 5635 - DNA, 11 bp, Homo sapiens
gagggaaatgg

SEQ ID NO: 5636 - DNA, 11 bp, Homo sapiens
aagctgtgtct

SEQ ID NO: 5637 - DNA, 11 bp, Homo sapiens
cacagggccat

SEQ ID NO: 5638 - DNA, 11 bp, Homo sapiens
gtagatgcaag

SEQ ID NO: 5639 - DNA, 11 bp, Homo sapiens
tcagcggagaa

SEQ ID NO: 5640 - DNA, 11 bp, Homo sapiens
gtgactgccac

SEQ ID NO: 5641 - DNA, 11 bp, Homo sapiens
ggcctgctgct

SEQ ID NO: 5642 - DNA, 11 bp, Homo sapiens
aaggaagcaat

SEQ ID NO: 5643 - DNA, 11 bp, Homo sapiens
aaatgccacac

SEQ ID NO: 5644 - DNA, 11 bp, Homo sapiens
tgtgttgagag

SEQ ID NO: 5645 - DNA, 11 bp, Homo sapiens
ctgctgagtga

SEQ ID NO: 5646 - DNA, 11 bp, Homo sapiens
cctgctccctg

SEQ ID NO: 5647 - DNA, 11 bp, Homo sapiens
gtagaaaagaa

SEQ ID NO: 5648 - DNA, 11 bp, Homo sapiens
agcctgttgca

SEQ ID NO: 5649 - DNA, 11 bp, Homo sapiens
tggaggtgggg

SEQ ID NO: 5650 - DNA, 11 bp, Homo sapiens
tggccctccag

SEQ ID NO: 5651 - DNA, 11 bp, Homo sapiens
ccgttctggat

SEQ ID NO: 5652 - DNA, 11 bp, Homo sapiens
gtgttgggggt

SEQ ID NO: 5653 - DNA, 11 bp, Homo sapiens
tgatgtttgac

SEQ ID NO: 5654 - DNA, 11 bp, Homo sapiens
tcacaagcaaa

SEQ ID NO: 5655 - DNA, 11 bp, Homo sapiens
tcagagaataa

SEQ ID NO: 5656 - DNA, 11 bp, Homo sapiens
catcccgtgac

SEQ ID NO: 5657 - DNA, 11 bp, Homo sapiens
ttaagacttca

SEQ ID NO: 5658 - DNA, 11 bp, Homo sapiens
acttgcgaata

SEQ ID NO: 5659 - DNA, 11 bp, Homo sapiens
tctggggaaat

SEQ ID NO: 5660 - DNA, 11 bp, Homo sapiens
gtgtaccggat

SEQ ID NO: 5661 - DNA, 11 bp, Homo sapiens
acgctcatcgt

SEQ ID NO: 5662 - DNA, 11 bp, Homo sapiens
ttcctttttac

SEQ ID NO: 5663 - DNA, 11 bp, Homo sapiens
atgcagagatt

SEQ ID NO: 5664 - DNA, 11 bp, Homo sapiens
tcacaaacttc

SEQ ID NO: 5665 - DNA, 11 bp, Homo sapiens
agactatattt

SEQ ID NO: 5666 - DNA, 11 bp, Homo sapiens
cctgaaaagct

SEQ ID NO: 5667 - DNA, 11 bp, Homo sapiens
tttctgtttta

SEQ ID NO: 5668 - DNA, 11 bp, Homo sapiens
tttctttttga

SEQ ID NO: 5669 - DNA, 11 bp, Homo sapiens
ttgttggtcaa

SEQ ID NO: 5670 - DNA, 11 bp, Homo sapiens
ggagccagctg

SEQ ID NO: 5671 - DNA, 11 bp, Homo sapiens
cagaagtgtca

SEQ ID NO: 5672 - DNA, 11 bp, Homo sapiens
atggggagaga

SEQ ID NO: 5673 - DNA, 11 bp, Homo sapiens
gcgtgacttct

SEQ ID NO: 5674 - DNA, 11 bp, Homo sapiens
caaaagcttat

SEQ ID NO: 5675 - DNA, 11 bp, Homo sapiens
gcttcgtgctg

SEQ ID NO: 5676 - DNA, 11 bp, Homo sapiens
aaagtggctac

SEQ ID NO: 5677 - DNA, 11 bp, Homo sapiens
gctagtgaaat

SEQ ID NO: 5678 - DNA, 11 bp, Homo sapiens
ctaaacttttt

SEQ ID NO: 5679 - DNA, 11 bp, Homo sapiens
cctgtaaccct

SEQ ID NO: 5680 - DNA, 11 bp, Homo sapiens
cctccagcccc

SEQ ID NO: 5681 - DNA, 11 bp, Homo sapiens
ctgtctgttct

SEQ ID NO: 5682 - DNA, 11 bp, Homo sapiens
tgggcaaagcc

SEQ ID NO: 5683 - DNA, 11 bp, Homo sapiens
tgcggctggtt

SEQ ID NO: 5684 - DNA, 11 bp, Homo sapiens
aagtgggtgcc

SEQ ID NO: 5685 - DNA, 11 bp, Homo sapiens
tgcccaggatt

SEQ ID NO: 5686 - DNA, 11 bp, Homo sapiens
tctgtatcccc

SEQ ID NO: 5687 - DNA, 11 bp, Homo sapiens
gcttaacctgg

SEQ ID NO: 5688 - DNA, 11 bp, Homo sapiens
gtattcccctt

SEQ ID NO: 5689 - DNA, 11 bp, Homo sapiens
cttgagcaata

SEQ ID NO: 5690 - DNA, 11 bp, Homo sapiens
gtgatcattaa

SEQ ID NO: 5691 - DNA, 11 bp, Homo sapiens
aaaatctgcca

SEQ ID NO: 5692 - DNA, 11 bp, Homo sapiens
gatggagccct

SEQ ID NO: 5693 - DNA, 11 bp, Homo sapiens
ctcaggaagct

SEQ ID NO: 5694 - DNA, 11 bp, Homo sapiens
gctttgtatcc

SEQ ID NO: 5695 - DNA, 11 bp, Homo sapiens
accaggtccac

SEQ ID NO: 5696 - DNA, 11 bp, Homo sapiens
ctggccgactt

SEQ ID NO: 5697 - DNA, 11 bp, Homo sapiens
gggaacggagg

SEQ ID NO: 5698 - DNA, 11 bp, Homo sapiens
aatggattatt

SEQ ID NO: 5699 - DNA, 11 bp, Homo sapiens
aagataaactc

SEQ ID NO: 5700 - DNA, 11 bp, Homo sapiens
tggctggccac

SEQ ID NO: 5701 - DNA, 11 bp, Homo sapiens
cttgtgatccc

SEQ ID NO: 5702 - DNA, 11 bp, Homo sapiens
gttaaaaaaaa

SEQ ID NO: 5703 - DNA, 11 bp, Homo sapiens
tggggccgcag

SEQ ID NO: 5704 - DNA, 11 bp, Homo sapiens
tctttttgggg

SEQ ID NO: 5705 - DNA, 11 bp, Homo sapiens
cttttgttttc

SEQ ID NO: 5706 - DNA, 11 bp, Homo sapiens
catagttttag

SEQ ID NO: 5707 - DNA, 11 bp, Homo sapiens
gctgattggca

SEQ ID NO: 5708 - DNA, 11 bp, Homo sapiens
tggttgcgaca

SEQ ID NO: 5709 - DNA, 11 bp, Homo sapiens
ttactaaatgg

SEQ ID NO: 5710 - DNA, 11 bp, Homo sapiens
tactaataaaa

SEQ ID NO: 5711 - DNA, 11 bp, Homo sapiens
ccttctggtgg

SEQ ID NO: 5712 - DNA, 11 bp, Homo sapiens
atgacactcac

SEQ ID NO: 5713 - DNA, 11 bp, Homo sapiens
gctcccagact

SEQ ID NO: 5714 - DNA, 11 bp, Homo sapiens
ggaagggaggc

SEQ ID NO: 5715 - DNA, 11 bp, Homo sapiens
taacccagcag

SEQ ID NO: 5716 - DNA, 11 bp, Homo sapiens
taaaaaaaaaa

SEQ ID NO: 5717 - DNA, 11 bp, Homo sapiens
ttttgtaaata

SEQ ID NO: 5718 - DNA, 11 bp, Homo sapiens
ggcattgttca

SEQ ID NO: 5719 - DNA, 11 bp, Homo sapiens
ttgggttttga

SEQ ID NO: 5720 - DNA, 11 bp, Homo sapiens
cctggataaat

SEQ ID NO: 5721 - DNA, 11 bp, Homo sapiens
ggcaatatggt

SEQ ID NO: 5722 - DNA, 11 bp, Homo sapiens
gaaaagagatt

SEQ ID NO: 5723 - DNA, 11 bp, Homo sapiens
tctgttaataa

SEQ ID NO: 5724 - DNA, 11 bp, Homo sapiens
tacattcacct

SEQ ID NO: 5725 - DNA, 11 bp, Homo sapiens
gttctcccttc

SEQ ID NO: 5726 - DNA, 11 bp, Homo sapiens
ctgtgctctaa

SEQ ID NO: 5727 - DNA, 11 bp, Homo sapiens
tgggctggggt

SEQ ID NO: 5728 - DNA, 11 bp, Homo sapiens
gaagaacaagt

SEQ ID NO: 5729 - DNA, 11 bp, Homo sapiens
ggaagatgttc

SEQ ID NO: 5730 - DNA, 11 bp, Homo sapiens
ttaataaaata

SEQ ID NO: 5731 - DNA, 11 bp, Homo sapiens
accttgggcaa

SEQ ID NO: 5732 - DNA, 11 bp, Homo sapiens
tgtacctaact

SEQ ID NO: 5733 - DNA, 11 bp, Homo sapiens
tggcttattaa

SEQ ID NO: 5734 - DNA, 11 bp, Homo sapiens
ttgtgatacta

SEQ ID NO: 5735 - DNA, 11 bp, Homo sapiens
ggctttccctg

SEQ ID NO: 5736 - DNA, 11 bp, Homo sapiens
tgtttaataca

SEQ ID NO: 5737 - DNA, 11 bp, Homo sapiens
caccaccacac

SEQ ID NO: 5738 - DNA, 11 bp, Homo sapiens
gggagcattaa

SEQ ID NO: 5739 - DNA, 11 bp, Homo sapiens
gggaggagggt

SEQ ID NO: 5740 - DNA, 11 bp, Homo sapiens
tggaccccccg

SEQ ID NO: 5741 - DNA, 11 bp, Homo sapiens
gtactgtatgc

SEQ ID NO: 5742 - DNA, 11 bp, Homo sapiens
gtgtgtttgta

SEQ ID NO: 5743 - DNA, 11 bp, Homo sapiens
cgcagtgtcct

SEQ ID NO: 5744 - DNA, 11 bp, Homo sapiens
agtgccgtgtg

SEQ ID NO: 5745 - DNA, 11 bp, Homo sapiens
gcctgaggggc

SEQ ID NO: 5746 - DNA, 11 bp, Homo sapiens
tctcaattctt

SEQ ID NO: 5747 - DNA, 11 bp, Homo sapiens
ttcattataat

SEQ ID NO: 5748 - DNA, 11 bp, Homo sapiens
gatgagtctcg

SEQ ID NO: 5749 - DNA, 11 bp, Homo sapiens
atggaaaggaa

SEQ ID NO: 5750 - DNA, 11 bp, Homo sapiens
tgctgcttgaa

SEQ ID NO: 5751 - DNA, 11 bp, Homo sapiens
tgttagcctgt

SEQ ID NO: 5752 - DNA, 11 bp, Homo sapiens
ttttctgagtg

SEQ ID NO: 5753 - DNA, 11 bp, Homo sapiens
accaaactgtg

SEQ ID NO: 5754 - DNA, 11 bp, Homo sapiens
tgaatactact

SEQ ID NO: 5755 - DNA, 11 bp, Homo sapiens
tcaagtccaga

SEQ ID NO: 5756 - DNA, 11 bp, Homo sapiens
tgtacttccta

SEQ ID NO: 5757 - DNA, 11 bp, Homo sapiens
gaggcagaaga

SEQ ID NO: 5758 - DNA, 11 bp, Homo sapiens
tgcctatagtc

SEQ ID NO: 5759 - DNA, 11 bp, Homo sapiens
gaaagattgga

SEQ ID NO: 5760 - DNA, 11 bp, Homo sapiens
gtcttcttaat

SEQ ID NO: 5761 - DNA, 11 bp, Homo sapiens
gaaggcaccat

SEQ ID NO: 5762 - DNA, 11 bp, Homo sapiens
aatggcactta

SEQ ID NO: 5763 - DNA, 11 bp, Homo sapiens
gatgagcggct

SEQ ID NO: 5764 - DNA, 11 bp, Homo sapiens
tgactgctgct

SEQ ID NO: 5765 - DNA, 11 bp, Homo sapiens
gcccagggacc

SEQ ID NO: 5766 - DNA, 11 bp, Homo sapiens
taaatgtcctg

SEQ ID NO: 5767 - DNA, 11 bp, Homo sapiens
gagaatctgat

SEQ ID NO: 5768 - DNA, 11 bp, Homo sapiens
tgttttggaac

SEQ ID NO: 5769 - DNA, 11 bp, Homo sapiens
tgtaagttttg

SEQ ID NO: 5770 - DNA, 11 bp, Homo sapiens
ttgtagctcaa

SEQ ID NO: 5771 - DNA, 11 bp, Homo sapiens
tggtcaaggtg

SEQ ID NO: 5772 - DNA, 11 bp, Homo sapiens
tatgtgccact

SEQ ID NO: 5773 - DNA, 11 bp, Homo sapiens
tatgccctatc

SEQ ID NO: 5774 - DNA, 11 bp, Homo sapiens
actgctgtcta

SEQ ID NO: 5775 - DNA, 11 bp, Homo sapiens
aatctggttgc

SEQ ID NO: 5776 - DNA, 11 bp, Homo sapiens
aggaaagctgc

SEQ ID NO: 5777 - DNA, 11 bp, Homo sapiens
acagtgcttgc

SEQ ID NO: 5778 - DNA, 11 bp, Homo sapiens
gcccccccgtg

SEQ ID NO: 5779 - DNA, 11 bp, Homo sapiens
gagcggcctct

SEQ ID NO: 5780 - DNA, 11 bp, Homo sapiens
acatcgtaggg

SEQ ID NO: 5781 - DNA, 11 bp, Homo sapiens
caagggtaaga

SEQ ID NO: 5782 - DNA, 11 bp, Homo sapiens
ttgtaatcgtg

SEQ ID NO: 5783 - DNA, 11 bp, Homo sapiens
gcaaaaaaaaa

SEQ ID NO: 5784 - DNA, 11 bp, Homo sapiens
gggtgtgtatt

SEQ ID NO: 5785 - DNA, 11 bp, Homo sapiens
atactgctgct

SEQ ID NO: 5786 - DNA, 11 bp, Homo sapiens
accataatgtg

SEQ ID NO: 5787 - DNA, 11 bp, Homo sapiens
gacttggaggc

SEQ ID NO: 5788 - DNA, 11 bp, Homo sapiens
gacagacatca

SEQ ID NO: 5789 - DNA, 11 bp, Homo sapiens
caggttgacag

SEQ ID NO: 5790 - DNA, 11 bp, Homo sapiens
gtgcatcccga

SEQ ID NO: 5791 - DNA, 11 bp, Homo sapiens
tttttaatgtt

SEQ ID NO: 5792 - DNA, 11 bp, Homo sapiens
tctatagagtt

SEQ ID NO: 5793 - DNA, 11 bp, Homo sapiens
tttattgaaaa

SEQ ID NO: 5794 - DNA, 11 bp, Homo sapiens
cgatcagtttg

SEQ ID NO: 5795 - DNA, 11 bp, Homo sapiens
ctgggaggagg

SEQ ID NO: 5796 - DNA, 11 bp, Homo sapiens
ctggtttctcc

SEQ ID NO: 5797 - DNA, 11 bp, Homo sapiens
cctaggacctg

SEQ ID NO: 5798 - DNA, 11 bp, Homo sapiens
aaggccaccgg

SEQ ID NO: 5799 - DNA, 11 bp, Homo sapiens
taaagtgtctg

SEQ ID NO: 5800 - DNA, 11 bp, Homo sapiens
tttagggggaa

SEQ ID NO: 5801 - DNA, 11 bp, Homo sapiens
tacaattgtga

SEQ ID NO: 5802 - DNA, 11 bp, Homo sapiens
gactgcgtgcc

SEQ ID NO: 5803 - DNA, 11 bp, Homo sapiens
cgtggggtggc

SEQ ID NO: 5804 - DNA, 11 bp, Homo sapiens
agcttggacag

SEQ ID NO: 5805 - DNA, 11 bp, Homo sapiens
tatgttcagaa

SEQ ID NO: 5806 - DNA, 11 bp, Homo sapiens
ctacaataaat

SEQ ID NO: 5807 - DNA, 11 bp, Homo sapiens
tatcctggtaa

SEQ ID NO: 5808 - DNA, 11 bp, Homo sapiens
caaataaactt

SEQ ID NO: 5809 - DNA, 11 bp, Homo sapiens
ctgccctggga

SEQ ID NO: 5810 - DNA, 11 bp, Homo sapiens
ccagaaagaat

SEQ ID NO: 5811 - DNA, 11 bp, Homo sapiens
atctctttccc

SEQ ID NO: 5812 - DNA, 11 bp, Homo sapiens
tctgttattgg

SEQ ID NO: 5813 - DNA, 11 bp, Homo sapiens
gagcacatcag

SEQ ID NO: 5814 - DNA, 11 bp, Homo sapiens
ccatccagtga

SEQ ID NO: 5815 - DNA, 11 bp, Homo sapiens
gccggcccggc

SEQ ID NO: 5816 - DNA, 11 bp, Homo sapiens
caaaccatccg

SEQ ID NO: 5817 - DNA, 11 bp, Homo sapiens
ttctctacaca

SEQ ID NO: 5818 - DNA, 11 bp, Homo sapiens
gagggtggcgc

SEQ ID NO: 5819 - DNA, 11 bp, Homo sapiens
ttgtccagagg

SEQ ID NO: 5820 - DNA, 11 bp, Homo sapiens
cttgtaatcct

SEQ ID NO: 5821 - DNA, 11 bp, Homo sapiens
ggctgattttt

SEQ ID NO: 5822 - DNA, 11 bp, Homo sapiens
tgctctgtgta

SEQ ID NO: 5823 - DNA, 11 bp, Homo sapiens
tatgtaatatg

SEQ ID NO: 5824 - DNA, 11 bp, Homo sapiens
ccacaacctgg

SEQ ID NO: 5825 - DNA, 11 bp, Homo sapiens
gaaaaatggtt

SEQ ID NO: 5826 - DNA, 11 bp, Homo sapiens
acggaacaata

SEQ ID NO: 5827 - DNA, 11 bp, Homo sapiens
taaaagacaaa

SEQ ID NO: 5828 - DNA, 11 bp, Homo sapiens
ctcaacatctc

SEQ ID NO: 5829 - DNA, 11 bp, Homo sapiens
caatcacaaaa

SEQ ID NO: 5830 - DNA, 11 bp, Homo sapiens
aatgcaagata

SEQ ID NO: 5831 - DNA, 11 bp, Homo sapiens
cccctccccag

SEQ ID NO: 5832 - DNA, 11 bp, Homo sapiens
agctctccctg

SEQ ID NO: 5833 - DNA, 11 bp, Homo sapiens
gatgtctctag

SEQ ID NO: 5834 - DNA, 11 bp, Homo sapiens
aataaagttgt

SEQ ID NO: 5835 - DNA, 11 bp, Homo sapiens
tggccaaaaaa

SEQ ID NO: 5836 - DNA, 11 bp, Homo sapiens
aatagctgatt

SEQ ID NO: 5837 - DNA, 11 bp, Homo sapiens
cccggccttaa

SEQ ID NO: 5838 - DNA, 11 bp, Homo sapiens
gaggaaggctc

SEQ ID NO: 5839 - DNA, 11 bp, Homo sapiens
ctatttaggga

SEQ ID NO: 5840 - DNA, 11 bp, Homo sapiens
ctagcagagca

SEQ ID NO: 5841 - DNA, 11 bp, Homo sapiens
gcctgtgggtt

SEQ ID NO: 5842 - DNA, 11 bp, Homo sapiens
ttttggatgta

SEQ ID NO: 5843 - DNA, 11 bp, Homo sapiens
accggggtgaa

SEQ ID NO: 5844 - DNA, 11 bp, Homo sapiens
gccccggagcc

SEQ ID NO: 5845 - DNA, 11 bp, Homo sapiens
aagacagagca

SEQ ID NO: 5846 - DNA, 11 bp, Homo sapiens
gggcagaatat

SEQ ID NO: 5847 - DNA, 11 bp, Homo sapiens
tgatcgcggct

SEQ ID NO: 5848 - DNA, 11 bp, Homo sapiens
gacaatgccag

SEQ ID NO: 5849 - DNA, 11 bp, Homo sapiens
agacaagctgg

SEQ ID NO: 5850 - DNA, 11 bp, Homo sapiens
gctggtgcctg

SEQ ID NO: 5851 - DNA, 11 bp, Homo sapiens
gctaaaaaaaa

SEQ ID NO: 5852 - DNA, 11 bp, Homo sapiens
tactaaaaaag

SEQ ID NO: 5853 - DNA, 11 bp, Homo sapiens
ctgggtctcca

SEQ ID NO: 5854 - DNA, 11 bp, Homo sapiens
gtatttaacat

SEQ ID NO: 5855 - DNA, 11 bp, Homo sapiens
gaaaaaatgtt

SEQ ID NO: 5856 - DNA, 11 bp, Homo sapiens
ggggggtggag

SEQ ID NO: 5857 - DNA, 11 bp, Homo sapiens
tcaagaaatta

SEQ ID NO: 5858 - DNA, 11 bp, Homo sapiens
gaatccgattt

SEQ ID NO: 5859 - DNA, 11 bp, Homo sapiens
gccgcttctag

SEQ ID NO: 5860 - DNA, 11 bp, Homo sapiens
agcgtgtgatg

SEQ ID NO: 5861 - DNA, 11 bp, Homo sapiens
gagggacttgg

SEQ ID NO: 5862 - DNA, 11 bp, Homo sapiens
caagcaaaata

SEQ ID NO: 5863 - DNA, 11 bp, Homo sapiens
aggagcaaagg

SEQ ID NO: 5864 - DNA, 11 bp, Homo sapiens
gccctgacctt

SEQ ID NO: 5865 - DNA, 11 bp, Homo sapiens
agtaaaacttc

SEQ ID NO: 5866 - DNA, 11 bp, Homo sapiens
tctaaagaatg

SEQ ID NO: 5867 - DNA, 11 bp, Homo sapiens
tatcttctaag

SEQ ID NO: 5868 - DNA, 11 bp, Homo sapiens
gttctatttaa

SEQ ID NO: 5869 - DNA, 11 bp, Homo sapiens
ccaggcactgt

SEQ ID NO: 5870 - DNA, 11 bp, Homo sapiens
gctgcctgcct

SEQ ID NO: 5871 - DNA, 11 bp, Homo sapiens
ctaaaactggt

SEQ ID NO: 5872 - DNA, 11 bp, Homo sapiens
aacctggcctc

SEQ ID NO: 5873 - DNA, 11 bp, Homo sapiens
tacaccaagaa

SEQ ID NO: 5874 - DNA, 11 bp, Homo sapiens
gagctgcaggg

SEQ ID NO: 5875 - DNA, 11 bp, Homo sapiens
tgtatatggtg

SEQ ID NO: 5876 - DNA, 11 bp, Homo sapiens
cttgagtcaca

SEQ ID NO: 5877 - DNA, 11 bp, Homo sapiens
ctttgttttgc

SEQ ID NO: 5878 - DNA, 11 bp, Homo sapiens
gatttaaaaaa

SEQ ID NO: 5879 - DNA, 11 bp, Homo sapiens
tgatgatgttg

SEQ ID NO: 5880 - DNA, 11 bp, Homo sapiens
ctggctccatc

SEQ ID NO: 5881 - DNA, 11 bp, Homo sapiens
ctcacacatta

SEQ ID NO: 5882 - DNA, 11 bp, Homo sapiens
gggccagggga

SEQ ID NO: 5883 - DNA, 11 bp, Homo sapiens
ggcccggcttt

SEQ ID NO: 5884 - DNA, 11 bp, Homo sapiens
tgaggcaggga

SEQ ID NO: 5885 - DNA, 11 bp, Homo sapiens
ggcaagaagaa

SEQ ID NO: 5886 - DNA, 11 bp, Homo sapiens
catctaaactg

SEQ ID NO: 5887 - DNA, 11 bp, Homo sapiens
tgttcatcatc

SEQ ID NO: 5888 - DNA, 11 bp, Homo sapiens
cagcagaagca

SEQ ID NO: 5889 - DNA, 11 bp, Homo sapiens
ttgaattcccc

SEQ ID NO: 5890 - DNA, 11 bp, Homo sapiens
acagtcttgcc

SEQ ID NO: 5891 - DNA, 11 bp, Homo sapiens
agcacttttgc

SEQ ID NO: 5892 - DNA, 11 bp, Homo sapiens
gagcagcgccc

SEQ ID NO: 5893 - DNA, 11 bp, Homo sapiens
agtttgggctg

SEQ ID NO: 5894 - DNA, 11 bp, Homo sapiens
gtgttgagaga

SEQ ID NO: 5895 - DNA, 11 bp, Homo sapiens
cccctgctgct

SEQ ID NO: 5896 - DNA, 11 bp, Homo sapiens
gcctgtttgta

SEQ ID NO: 5897 - DNA, 11 bp, Homo sapiens
tacgcttggtc

SEQ ID NO: 5898 - DNA, 11 bp, Homo sapiens
tggggattacc

SEQ ID NO: 5899 - DNA, 11 bp, Homo sapiens
tggtttattaa

SEQ ID NO: 5900 - DNA, 11 bp, Homo sapiens
tccagggctct

SEQ ID NO: 5901 - DNA, 11 bp, Homo sapiens
ccagtagaagt

SEQ ID NO: 5902 - DNA, 11 bp, Homo sapiens
tggttttgtat

SEQ ID NO: 5903 - DNA, 11 bp, Homo sapiens
taaattttaaa

SEQ ID NO: 5904 - DNA, 11 bp, Homo sapiens
gtgtgggagat

SEQ ID NO: 5905 - DNA, 11 bp, Homo sapiens
gaagtgcccat

SEQ ID NO: 5906 - DNA, 11 bp, Homo sapiens
ctagcctcacg

SEQ ID NO: 5907 - DNA, 11 bp, Homo sapiens
tgcctgctcct

SEQ ID NO: 5908 - DNA, 11 bp, Homo sapiens
gccgcctgcct

SEQ ID NO: 5909 - DNA, 11 bp, Homo sapiens
agccgggcttt

SEQ ID NO: 5910 - DNA, 11 bp, Homo sapiens
gaggggatgta

SEQ ID NO: 5911 - DNA, 11 bp, Homo sapiens
actttgaatga

SEQ ID NO: 5912 - DNA, 11 bp, Homo sapiens
ctgcccgcctg

SEQ ID NO: 5913 - DNA, 11 bp, Homo sapiens
ctgttggtgat

SEQ ID NO: 5914 - DNA, 11 bp, Homo sapiens
tgtgctcaggg

SEQ ID NO: 5915 - DNA, 11 bp, Homo sapiens
ttctttgggaa

SEQ ID NO: 5916 - DNA, 11 bp, Homo sapiens
ggcatcagggg

SEQ ID NO: 5917 - DNA, 11 bp, Homo sapiens
tctgcaagaag

SEQ ID NO: 5918 - DNA, 11 bp, Homo sapiens
cgtggccacgg

SEQ ID NO: 5919 - DNA, 11 bp, Homo sapiens
gtgtgcttaga

SEQ ID NO: 5920 - DNA, 11 bp, Homo sapiens
gtggggaggac

SEQ ID NO: 5921 - DNA, 11 bp, Homo sapiens
tctgtcaatct

SEQ ID NO: 5922 - DNA, 11 bp, Homo sapiens
aataaacgtgt

SEQ ID NO: 5923 - DNA, 11 bp, Homo sapiens
agcgccttcct

SEQ ID NO: 5924 - DNA, 11 bp, Homo sapiens
ctcagcctgaa

SEQ ID NO: 5925 - DNA, 11 bp, Homo sapiens
gcagtgccact

SEQ ID NO: 5926 - DNA, 11 bp, Homo sapiens
ctagaagtaca

SEQ ID NO: 5927 - DNA, 11 bp, Homo sapiens
attttgtcgtg

SEQ ID NO: 5928 - DNA, 11 bp, Homo sapiens
gatttcagctc

SEQ ID NO: 5929 - DNA, 11 bp, Homo sapiens
tcacagcaagg

SEQ ID NO: 5930 - DNA, 11 bp, Homo sapiens
gctgggcggct

SEQ ID NO: 5931 - DNA, 11 bp, Homo sapiens
aggatatccag

SEQ ID NO: 5932 - DNA, 11 bp, Homo sapiens
tattcactaaa

SEQ ID NO: 5933 - DNA, 11 bp, Homo sapiens
ggcctccagcc

SEQ ID NO: 5934 - DNA, 11 bp, Homo sapiens
atttgtatcta

SEQ ID NO: 5935 - DNA, 11 bp, Homo sapiens
agtaagctccc

SEQ ID NO: 5936 - DNA, 11 bp, Homo sapiens
ccctcgcattg

SEQ ID NO: 5937 - DNA, 11 bp, Homo sapiens
gagagaagagt

SEQ ID NO: 5938 - DNA, 11 bp, Homo sapiens
gattacttgcc

SEQ ID NO: 5939 - DNA, 11 bp, Homo sapiens
ttcttatttta

SEQ ID NO: 5940 - DNA, 11 bp, Homo sapiens
gggtcaaaagg

SEQ ID NO: 5941 - DNA, 11 bp, Homo sapiens
gagttggcagt

SEQ ID NO: 5942 - DNA, 11 bp, Homo sapiens
gcctttccctc

SEQ ID NO: 5943 - DNA, 11 bp, Homo sapiens
gcatatgagca

SEQ ID NO: 5944 - DNA, 11 bp, Homo sapiens
aacagaatatg

SEQ ID NO: 5945 - DNA, 11 bp, Homo sapiens
tgtgctaaatg

SEQ ID NO: 5946 - DNA, 11 bp, Homo sapiens
gaaatgtaaga

SEQ ID NO: 5947 - DNA, 11 bp, Homo sapiens
tgaagagaatt

SEQ ID NO: 5948 - DNA, 11 bp, Homo sapiens
ctgcttaaggg

SEQ ID NO: 5949 - DNA, 11 bp, Homo sapiens
gctcaggtctg

SEQ ID NO: 5950 - DNA, 11 bp, Homo sapiens
ttcttgcttaa

SEQ ID NO: 5951 - DNA, 11 bp, Homo sapiens
tttcttaaagg

SEQ ID NO: 5952 - DNA, 11 bp, Homo sapiens
tagaatgcaaa

SEQ ID NO: 5953 - DNA, 11 bp, Homo sapiens
cttcccactct

SEQ ID NO: 5954 - DNA, 11 bp, Homo sapiens
aaatcctagaa

SEQ ID NO: 5955 - DNA, 11 bp, Homo sapiens
acagctaatta

SEQ ID NO: 5956 - DNA, 11 bp, Homo sapiens
tttcatctgta

SEQ ID NO: 5957 - DNA, 11 bp, Homo sapiens
cgtgttgagag

SEQ ID NO: 5958 - DNA, 11 bp, Homo sapiens
tctactgttag

SEQ ID NO: 5959 - DNA, 11 bp, Homo sapiens
taaataaagca

SEQ ID NO: 5960 - DNA, 11 bp, Homo sapiens
aactgggtctg

SEQ ID NO: 5961 - DNA, 11 bp, Homo sapiens
aatacatcaaa

SEQ ID NO: 5962 - DNA, 11 bp, Homo sapiens
cctgagttgat

SEQ ID NO: 5963 - DNA, 11 bp, Homo sapiens
aaatctctggt

SEQ ID NO: 5964 - DNA, 11 bp, Homo sapiens
tgctacgatct

SEQ ID NO: 5965 - DNA, 11 bp, Homo sapiens
gcgacagctcc

SEQ ID NO: 5966 - DNA, 11 bp, Homo sapiens
atacaataaaa

SEQ ID NO: 5967 - DNA, 11 bp, Homo sapiens
gaggccgaccc

SEQ ID NO: 5968 - DNA, 11 bp, Homo sapiens
gcaagacccca

SEQ ID NO: 5969 - DNA, 11 bp, Homo sapiens
ggccgctgctc

SEQ ID NO: 5970 - DNA, 11 bp, Homo sapiens
ggtgagacact

SEQ ID NO: 5971 - DNA, 11 bp, Homo sapiens
tctgtttatca

SEQ ID NO: 5972 - DNA, 11 bp, Homo sapiens
tgctgggtggg

SEQ ID NO: 5973 - DNA, 11 bp, Homo sapiens
tcacctgtagg

SEQ ID NO: 5974 - DNA, 11 bp, Homo sapiens
cttgacacaca

SEQ ID NO: 5975 - DNA, 11 bp, Homo sapiens
tgaaggagccg

SEQ ID NO: 5976 - DNA, 11 bp, Homo sapiens
ctttgatgttc

SEQ ID NO: 5977 - DNA, 11 bp, Homo sapiens
tcgtctttatc

SEQ ID NO: 5978 - DNA, 11 bp, Homo sapiens
atggcaaggga

SEQ ID NO: 5979 - DNA, 11 bp, Homo sapiens
agtaaaaaaaa

SEQ ID NO: 5980 - DNA, 11 bp, Homo sapiens
cagtggaatgc

SEQ ID NO: 5981 - DNA, 11 bp, Homo sapiens
gtgtcttgtag

SEQ ID NO: 5982 - DNA, 11 bp, Homo sapiens
caaaaggctct

SEQ ID NO: 5983 - DNA, 11 bp, Homo sapiens
tatagtggcta

SEQ ID NO: 5984 - DNA, 11 bp, Homo sapiens
gttctctttgt

SEQ ID NO: 5985 - DNA, 11 bp, Homo sapiens
cacaagcttca

SEQ ID NO: 5986 - DNA, 11 bp, Homo sapiens
acgtgagtgct

SEQ ID NO: 5987 - DNA, 11 bp, Homo sapiens
tcttctgcttt

SEQ ID NO: 5988 - DNA, 11 bp, Homo sapiens
ccttccctgag

SEQ ID NO: 5989 - DNA, 11 bp, Homo sapiens
cctggaggggc

SEQ ID NO: 5990 - DNA, 11 bp, Homo sapiens
tggatgctgtt

SEQ ID NO: 5991 - DNA, 11 bp, Homo sapiens
cagccctcccg

SEQ ID NO: 5992 - DNA, 11 bp, Homo sapiens
tatggtaccaa

SEQ ID NO: 5993 - DNA, 11 bp, Homo sapiens
agagactcttg

SEQ ID NO: 5994 - DNA, 11 bp, Homo sapiens
cagccataaaa

SEQ ID NO: 5995 - DNA, 11 bp, Homo sapiens
aagctgtataa

SEQ ID NO: 5996 - DNA, 11 bp, Homo sapiens
tggcctaatat

SEQ ID NO: 5997 - DNA, 11 bp, Homo sapiens
ttgctgtagac

SEQ ID NO: 5998 - DNA, 11 bp, Homo sapiens
ttactgcctag

SEQ ID NO: 5999 - DNA, 11 bp, Homo sapiens
tagctgccttt

SEQ ID NO: 6000 - DNA, 11 bp, Homo sapiens
ctgggttgtga

SEQ ID NO: 6001 - DNA, 11 bp, Homo sapiens
tggtttgcgta

SEQ ID NO: 6002 - DNA, 11 bp, Homo sapiens
ctcatcagctt

SEQ ID NO: 6003 - DNA, 11 bp, Homo sapiens
cacccccaggc

SEQ ID NO: 6004 - DNA, 11 bp, Homo sapiens
caaaaaaaaaa

SEQ ID NO: 6005 - DNA, 11 bp, Homo sapiens
ccgccgaagtt

SEQ ID NO: 6006 - DNA, 11 bp, Homo sapiens
tgtacctgtaa

SEQ ID NO: 6007 - DNA, 11 bp, Homo sapiens
aaaaaaaaaag

SEQ ID NO: 6008 - DNA, 11 bp, Homo sapiens
tggatcaacca

SEQ ID NO: 6009 - DNA, 11 bp, Homo sapiens
gaagtgtgtcc

SEQ ID NO: 6010 - DNA, 11 bp, Homo sapiens
cccaattttca

SEQ ID NO: 6011 - DNA, 11 bp, Homo sapiens
cagatttgcat

SEQ ID NO: 6012 - DNA, 11 bp, Homo sapiens
ggtcccctacc

SEQ ID NO: 6013 - DNA, 11 bp, Homo sapiens
aatcctgtgga

SEQ ID NO: 6014 - DNA, 11 bp, Homo sapiens
aggggattccc

SEQ ID NO: 6015 - DNA, 11 bp, Homo sapiens
ctttctttgag

SEQ ID NO: 6016 - DNA, 11 bp, Homo sapiens
agagacaagtc

SEQ ID NO: 6017 - DNA, 11 bp, Homo sapiens
tgttttcgcct

SEQ ID NO: 6018 - DNA, 11 bp, Homo sapiens
ggcccacaccc

SEQ ID NO: 6019 - DNA, 11 bp, Homo sapiens
gtgaaacatta

SEQ ID NO: 6020 - DNA, 11 bp, Homo sapiens
gatttgaaatg

SEQ ID NO: 6021 - DNA, 11 bp, Homo sapiens
cacagtcaaaa

SEQ ID NO: 6022 - DNA, 11 bp, Homo sapiens
taacccaacaa

SEQ ID NO: 6023 - DNA, 11 bp, Homo sapiens
tgggaaaactc

SEQ ID NO: 6024 - DNA, 11 bp, Homo sapiens
aaatcgatgag

SEQ ID NO: 6025 - DNA, 11 bp, Homo sapiens
ggaagatgaac

SEQ ID NO: 6026 - DNA, 11 bp, Homo sapiens
aggttttgcct

SEQ ID NO: 6027 - DNA, 11 bp, Homo sapiens
gccctcggccg

SEQ ID NO: 6028 - DNA, 11 bp, Homo sapiens
cggagacccta

SEQ ID NO: 6029 - DNA, 11 bp, Homo sapiens
aatgaaaaaaa

SEQ ID NO: 6030 - DNA, 11 bp, Homo sapiens
ctgctatacga

SEQ ID NO: 6031 - DNA, 11 bp, Homo sapiens
ccactcctcaa

SEQ ID NO: 6032 - DNA, 11 bp, Homo sapiens
cccaacccctg

SEQ ID NO: 6033 - DNA, 11 bp, Homo sapiens
cctgagcccgg

SEQ ID NO: 6034 - DNA, 11 bp, Homo sapiens
gcgctggagtg

SEQ ID NO: 6035 - DNA, 11 bp, Homo sapiens
tggcagctttt

SEQ ID NO: 6036 - DNA, 11 bp, Homo sapiens
cagcttcacct

SEQ ID NO: 6037 - DNA, 11 bp, Homo sapiens
agtggctgtgt

SEQ ID NO: 6038 - DNA, 11 bp, Homo sapiens
actccttcctc

SEQ ID NO: 6039 - DNA, 11 bp, Homo sapiens
gcaaatctgaa

SEQ ID NO: 6040 - DNA, 11 bp, Homo sapiens
taaaggttttt

SEQ ID NO: 6041 - DNA, 11 bp, Homo sapiens
ccttttgggtt

SEQ ID NO: 6042 - DNA, 11 bp, Homo sapiens
aaaggaataat

SEQ ID NO: 6043 - DNA, 11 bp, Homo sapiens
attttaacaaa

SEQ ID NO: 6044 - DNA, 11 bp, Homo sapiens
aaccaggtgtg

SEQ ID NO: 6045 - DNA, 11 bp, Homo sapiens
tttgtgtcaaa

SEQ ID NO: 6046 - DNA, 11 bp, Homo sapiens
ggtcccgttcc

SEQ ID NO: 6047 - DNA, 11 bp, Homo sapiens
acaaaagacaa

SEQ ID NO: 6048 - DNA, 11 bp, Homo sapiens
ccttggttttg

SEQ ID NO: 6049 - DNA, 11 bp, Homo sapiens
ttctcccaaat

SEQ ID NO: 6050 - DNA, 11 bp, Homo sapiens
tggtagttacc

SEQ ID NO: 6051 - DNA, 11 bp, Homo sapiens
tttgttaaaac

SEQ ID NO: 6052 - DNA, 11 bp, Homo sapiens
cttcgaaactc

SEQ ID NO: 6053 - DNA, 11 bp, Homo sapiens
gcagtcgcttg

SEQ ID NO: 6054 - DNA, 11 bp, Homo sapiens
gctgaaggaaa

SEQ ID NO: 6055 - DNA, 11 bp, Homo sapiens
gcctcctgagt

SEQ ID NO: 6056 - DNA, 11 bp, Homo sapiens
tgaggccaggc

SEQ ID NO: 6057 - DNA, 11 bp, Homo sapiens
gtctggggctt

SEQ ID NO: 6058 - DNA, 11 bp, Homo sapiens
ttggggtttcc

SEQ ID NO: 6059 - DNA, 11 bp, Homo sapiens
tcagccttctg

SEQ ID NO: 6060 - DNA, 11 bp, Homo sapiens
atcgctttcta

SEQ ID NO: 6061 - DNA, 11 bp, Homo sapiens
cttttgtttgg

SEQ ID NO: 6062 - DNA, 11 bp, Homo sapiens
caaatgcaaag

SEQ ID NO: 6063 - DNA, 11 bp, Homo sapiens
agcactgcagc

SEQ ID NO: 6064 - DNA, 11 bp, Homo sapiens
taggaaacacc

SEQ ID NO: 6065 - DNA, 11 bp, Homo sapiens
gacgttcactg

SEQ ID NO: 6066 - DNA, 11 bp, Homo sapiens
tatgctgttat

SEQ ID NO: 6067 - DNA, 11 bp, Homo sapiens
ttagtcaggct

SEQ ID NO: 6068 - DNA, 11 bp, Homo sapiens
gcccattttat

SEQ ID NO: 6069 - DNA, 11 bp, Homo sapiens
gaacgctgaag

SEQ ID NO: 6070 - DNA, 11 bp, Homo sapiens
tatcctagggt

SEQ ID NO: 6071 - DNA, 11 bp, Homo sapiens
tcaacagcagg

SEQ ID NO: 6072 - DNA, 11 bp, Homo sapiens
tccatcaagaa

SEQ ID NO: 6073 - DNA, 11 bp, Homo sapiens
tagccgctgag

SEQ ID NO: 6074 - DNA, 11 bp, Homo sapiens
ggccctctgag

SEQ ID NO: 6075 - DNA, 11 bp, Homo sapiens
ggtccagtgtt

SEQ ID NO: 6076 - DNA, 11 bp, Homo sapiens
ggtggagcaga

SEQ ID NO: 6077 - DNA, 11 bp, Homo sapiens
gcggcggcgag

SEQ ID NO: 6078 - DNA, 11 bp, Homo sapiens
tgtgggaaatc

SEQ ID NO: 6079 - DNA, 11 bp, Homo sapiens
agttccaccag

SEQ ID NO: 6080 - DNA, 11 bp, Homo sapiens
gatgttaattg

SEQ ID NO: 6081 - DNA, 11 bp, Homo sapiens
aactcttgaag

SEQ ID NO: 6082 - DNA, 11 bp, Homo sapiens
gaagatgtggg

SEQ ID NO: 6083 - DNA, 11 bp, Homo sapiens
aacagaagcaa

SEQ ID NO: 6084 - DNA, 11 bp, Homo sapiens
gtgacagacat

SEQ ID NO: 6085 - DNA, 11 bp, Homo sapiens
gctcagctgga

SEQ ID NO: 6086 - DNA, 11 bp, Homo sapiens
tgctttgggat

SEQ ID NO: 6087 - DNA, 11 bp, Homo sapiens
ggctcctcgag

SEQ ID NO: 6088 - DNA, 11 bp, Homo sapiens
gctccgagcgt

SEQ ID NO: 6089 - DNA, 11 bp, Homo sapiens
cctagctggat

SEQ ID NO: 6090 - DNA, 11 bp, Homo sapiens
gtggaccccaa

SEQ ID NO: 6091 - DNA, 11 bp, Homo sapiens
gctttactttg

SEQ ID NO: 6092 - DNA, 11 bp, Homo sapiens
accttcctagt

SEQ ID NO: 6093 - DNA, 11 bp, Homo sapiens
aggaaaagatg

SEQ ID NO: 6094 - DNA, 11 bp, Homo sapiens
gtaggagctgg

SEQ ID NO: 6095 - DNA, 11 bp, Homo sapiens
attgaccgctg

SEQ ID NO: 6096 - DNA, 11 bp, Homo sapiens
gaggacttgcg

SEQ ID NO: 6097 - DNA, 11 bp, Homo sapiens
gcattttgtga

SEQ ID NO: 6098 - DNA, 11 bp, Homo sapiens
ggctgggtttt

SEQ ID NO: 6099 - DNA, 11 bp, Homo sapiens
cgtgaacaatt

SEQ ID NO: 6100 - DNA, 11 bp, Homo sapiens
ttcccaaaggc

SEQ ID NO: 6101 - DNA, 11 bp, Homo sapiens
ttcaccagggc

SEQ ID NO: 6102 - DNA, 11 bp, Homo sapiens
gtactctactt

SEQ ID NO: 6103 - DNA, 11 bp, Homo sapiens
ctggtggtgcc

SEQ ID NO: 6104 - DNA, 11 bp, Homo sapiens
ttccctgggaa

SEQ ID NO: 6105 - DNA, 11 bp, Homo sapiens
ctgggggaggg

SEQ ID NO: 6106 - DNA, 11 bp, Homo sapiens
gctgtacaaag

SEQ ID NO: 6107 - DNA, 11 bp, Homo sapiens
tgacctatttc

SEQ ID NO: 6108 - DNA, 11 bp, Homo sapiens
atcagtgtgaa

SEQ ID NO: 6109 - DNA, 11 bp, Homo sapiens
aggaaagccag

SEQ ID NO: 6110 - DNA, 11 bp, Homo sapiens
ccgaagtcgag

SEQ ID NO: 6111 - DNA, 11 bp, Homo sapiens
gagaaagaggc

SEQ ID NO: 6112 - DNA, 11 bp, Homo sapiens
gcacctattga

SEQ ID NO: 6113 - DNA, 11 bp, Homo sapiens
tcttcgtcctg

SEQ ID NO: 6114 - DNA, 11 bp, Homo sapiens
ccaccgcactt

SEQ ID NO: 6115 - DNA, 11 bp, Homo sapiens
gaactggagaa

SEQ ID NO: 6116 - DNA, 11 bp, Homo sapiens
ttgggcactag

SEQ ID NO: 6117 - DNA, 11 bp, Homo sapiens
gttgacttaca

SEQ ID NO: 6118 - DNA, 11 bp, Homo sapiens
aacttgcccat

SEQ ID NO: 6119 - DNA, 11 bp, Homo sapiens
gtgttgcacaa

SEQ ID NO: 6120 - DNA, 11 bp, Homo sapiens
tggagagcaac

SEQ ID NO: 6121 - DNA, 11 bp, Homo sapiens
ctcactttttt

SEQ ID NO: 6122 - DNA, 11 bp, Homo sapiens
tgactggcagt

SEQ ID NO: 6123 - DNA, 11 bp, Homo sapiens
gaggcgctggg

SEQ ID NO: 6124 - DNA, 11 bp, Homo sapiens
gtggggtgaca

SEQ ID NO: 6125 - DNA, 11 bp, Homo sapiens
ttttactcaca

SEQ ID NO: 6126 - DNA, 11 bp, Homo sapiens
caataaactga

SEQ ID NO: 6127 - DNA, 11 bp, Homo sapiens
actgaaggcgc

SEQ ID NO: 6128 - DNA, 11 bp, Homo sapiens
cttctcaccgt

SEQ ID NO: 6129 - DNA, 11 bp, Homo sapiens
tggaactgtga

SEQ ID NO: 6130 - DNA, 11 bp, Homo sapiens
aagaatctgaa

SEQ ID NO: 6131 - DNA, 11 bp, Homo sapiens
ggaaggacaga

SEQ ID NO: 6132 - DNA, 11 bp, Homo sapiens
gtaagatttga

SEQ ID NO: 6133 - DNA, 11 bp, Homo sapiens
ttaaacctcaa

SEQ ID NO: 6134 - DNA, 11 bp, Homo sapiens
caccacggtgt

SEQ ID NO: 6135 - DNA, 11 bp, Homo sapiens
gtagcaaaaaa

SEQ ID NO: 6136 - DNA, 11 bp, Homo sapiens
gtcccaaaatg

SEQ ID NO: 6137 - DNA, 11 bp, Homo sapiens
tcggttacaag

SEQ ID NO: 6138 - DNA, 11 bp, Homo sapiens
gtcagactgta

SEQ ID NO: 6139 - DNA, 11 bp, Homo sapiens
taatctttact

SEQ ID NO: 6140 - DNA, 11 bp, Homo sapiens
ttagtcttcag

SEQ ID NO: 6141 - DNA, 11 bp, Homo sapiens
tcatagttcag

SEQ ID NO: 6142 - DNA, 11 bp, Homo sapiens
tttggagcatt

SEQ ID NO: 6143 - DNA, 11 bp, Homo sapiens
ggagagaaaac

SEQ ID NO: 6144 - DNA, 11 bp, Homo sapiens
ggccagtgttg

SEQ ID NO: 6145 - DNA, 11 bp, Homo sapiens
ctactcttcta

SEQ ID NO: 6146 - DNA, 11 bp, Homo sapiens
ttttaacaaaa

SEQ ID NO: 6147 - DNA, 11 bp, Homo sapiens
tatgtatgttg

SEQ ID NO: 6148 - DNA, 11 bp, Homo sapiens
aggggaaaata

SEQ ID NO: 6149 - DNA, 11 bp, Homo sapiens
atggcagagac

SEQ ID NO: 6150 - DNA, 11 bp, Homo sapiens
gcctgctgggc

SEQ ID NO: 6151 - DNA, 11 bp, Homo sapiens
gtttcttccct

SEQ ID NO: 6152 - DNA, 11 bp, Homo sapiens
ccggacctgtg

SEQ ID NO: 6153 - DNA, 11 bp, Homo sapiens
gctttcattgg

SEQ ID NO: 6154 - DNA, 11 bp, Homo sapiens
ttggagatctc

SEQ ID NO: 6155 - DNA, 11 bp, Homo sapiens
actgctgaacc

SEQ ID NO: 6156 - DNA, 11 bp, Homo sapiens
cacttgcccta

SEQ ID NO: 6157 - DNA, 11 bp, Homo sapiens
gccaagatgcc

SEQ ID NO: 6158 - DNA, 11 bp, Homo sapiens
cctgcccccct

SEQ ID NO: 6159 - DNA, 11 bp, Homo sapiens
acacttctttc

SEQ ID NO: 6160 - DNA, 11 bp, Homo sapiens
gctaggtctgg

SEQ ID NO: 6161 - DNA, 11 bp, Homo sapiens
tccatcccttg

SEQ ID NO: 6162 - DNA, 11 bp, Homo sapiens
aggcctggcta

SEQ ID NO: 6163 - DNA, 11 bp, Homo sapiens
gagagcctgcc

SEQ ID NO: 6164 - DNA, 11 bp, Homo sapiens
gtttaaaaaga

SEQ ID NO: 6165 - DNA, 11 bp, Homo sapiens
ccaaggactct

SEQ ID NO: 6166 - DNA, 11 bp, Homo sapiens
gaaaagttgcc

SEQ ID NO: 6167 - DNA, 11 bp, Homo sapiens
aattatgactt

SEQ ID NO: 6168 - DNA, 11 bp, Homo sapiens
tcagtgctctc

SEQ ID NO: 6169 - DNA, 11 bp, Homo sapiens
cctgtctgcac

SEQ ID NO: 6170 - DNA, 11 bp, Homo sapiens
cgaataaaatg

SEQ ID NO: 6171 - DNA, 11 bp, Homo sapiens
tttggacaata

SEQ ID NO: 6172 - DNA, 11 bp, Homo sapiens
gacgactgacc

SEQ ID NO: 6173 - DNA, 11 bp, Homo sapiens
ccctatcacaa

SEQ ID NO: 6174 - DNA, 11 bp, Homo sapiens
gtgaataaaca

SEQ ID NO: 6175 - DNA, 11 bp, Homo sapiens
gtgggaccatt

SEQ ID NO: 6176 - DNA, 11 bp, Homo sapiens
ctcaggaaata

SEQ ID NO: 6177 - DNA, 11 bp, Homo sapiens
accaaggagga

SEQ ID NO: 6178 - DNA, 11 bp, Homo sapiens
tctctacccac

SEQ ID NO: 6179 - DNA, 11 bp, Homo sapiens
cagtctctcaa

SEQ ID NO: 6180 - DNA, 11 bp, Homo sapiens
ccttgagtaca

SEQ ID NO: 6181 - DNA, 11 bp, Homo sapiens
tgcagacccat

SEQ ID NO: 6182 - DNA, 11 bp, Homo sapiens
gggccaaaacc

SEQ ID NO: 6183 - DNA, 11 bp, Homo sapiens
gtccttcagaa

SEQ ID NO: 6184 - DNA, 11 bp, Homo sapiens
cagtctgggag

SEQ ID NO: 6185 - DNA, 11 bp, Homo sapiens
cgccgcttctt

SEQ ID NO: 6186 - DNA, 11 bp, Homo sapiens
gcttggcctgg

SEQ ID NO: 6187 - DNA, 11 bp, Homo sapiens
agaacctgcaa

SEQ ID NO: 6188 - DNA, 11 bp, Homo sapiens
agggccacctc

SEQ ID NO: 6189 - DNA, 11 bp, Homo sapiens
ggtcctgttcc

SEQ ID NO: 6190 - DNA, 11 bp, Homo sapiens
ggccagccctt

SEQ ID NO: 6191 - DNA, 11 bp, Homo sapiens
gggggtggatg

SEQ ID NO: 6192 - DNA, 11 bp, Homo sapiens
aagaagacttc

SEQ ID NO: 6193 - DNA, 11 bp, Homo sapiens
acctgctggtg

SEQ ID NO: 6194 - DNA, 11 bp, Homo sapiens
gggaaggcact

SEQ ID NO: 6195 - DNA, 11 bp, Homo sapiens
actcagcccgg

SEQ ID NO: 6196 - DNA, 11 bp, Homo sapiens
tcttaatgaag

SEQ ID NO: 6197 - DNA, 11 bp, Homo sapiens
caggaggagtt

SEQ ID NO: 6198 - DNA, 11 bp, Homo sapiens
cgccggaacac

SEQ ID NO: 6199 - DNA, 11 bp, Homo sapiens
cggctggtgaa

SEQ ID NO: 6200 - DNA, 11 bp, Homo sapiens
cacttcaaggg

SEQ ID NO: 6201 - DNA, 11 bp, Homo sapiens
gacaggctggc

SEQ ID NO: 6202 - DNA, 11 bp, Homo sapiens
aactcccagtt

SEQ ID NO: 6203 - DNA, 11 bp, Homo sapiens
gagccatagaa

SEQ ID NO: 6204 - DNA, 11 bp, Homo sapiens
attaaagtcag

SEQ ID NO: 6205 - DNA, 11 bp, Homo sapiens
gtagagttggg

SEQ ID NO: 6206 - DNA, 11 bp, Homo sapiens
aatccaaaggc

SEQ ID NO: 6207 - DNA, 11 bp, Homo sapiens
tggtctggagg

SEQ ID NO: 6208 - DNA, 11 bp, Homo sapiens
ttacttcaact

SEQ ID NO: 6209 - DNA, 11 bp, Homo sapiens
tgtctgcctga

SEQ ID NO: 6210 - DNA, 11 bp, Homo sapiens
atttcccaaat

SEQ ID NO: 6211 - DNA, 11 bp, Homo sapiens
cagataaacca

SEQ ID NO: 6212 - DNA, 11 bp, Homo sapiens
tcacaaaagag

SEQ ID NO: 6213 - DNA, 11 bp, Homo sapiens
gggggctgctc

SEQ ID NO: 6214 - DNA, 11 bp, Homo sapiens
gcccgccttgt

SEQ ID NO: 6215 - DNA, 11 bp, Homo sapiens
aggtttcctcc

SEQ ID NO: 6216 - DNA, 11 bp, Homo sapiens
ggagccattct

SEQ ID NO: 6217 - DNA, 11 bp, Homo sapiens
tgcccccctag

SEQ ID NO: 6218 - DNA, 11 bp, Homo sapiens
ttaaagattta

SEQ ID NO: 6219 - DNA, 11 bp, Homo sapiens
gtgacagaaga

SEQ ID NO: 6220 - DNA, 11 bp, Homo sapiens
cccccgtgaag

SEQ ID NO: 6221 - DNA, 11 bp, Homo sapiens
tcttccaggag

SEQ ID NO: 6222 - DNA, 11 bp, Homo sapiens
cattaaattca

SEQ ID NO: 6223 - DNA, 11 bp, Homo sapiens
ttttagcagga

SEQ ID NO: 6224 - DNA, 11 bp, Homo sapiens
ggggctgtatt

SEQ ID NO: 6225 - DNA, 11 bp, Homo sapiens
tggaggccagg

SEQ ID NO: 6226 - DNA, 11 bp, Homo sapiens
tgtgggtgctg

SEQ ID NO: 6227 - DNA, 11 bp, Homo sapiens
gggaggattaa

SEQ ID NO: 6228 - DNA, 11 bp, Homo sapiens
gtgtgatgctg

SEQ ID NO: 6229 - DNA, 11 bp, Homo sapiens
aatgtgatttc

SEQ ID NO: 6230 - DNA, 11 bp, Homo sapiens
acatcatactg

SEQ ID NO: 6231 - DNA, 11 bp, Homo sapiens
tgatgtttgca

SEQ ID NO: 6232 - DNA, 11 bp, Homo sapiens
cttctgttttt

SEQ ID NO: 6233 - DNA, 11 bp, Homo sapiens
gttggataggg

SEQ ID NO: 6234 - DNA, 11 bp, Homo sapiens
cactctatccg

SEQ ID NO: 6235 - DNA, 11 bp, Homo sapiens
aattctgtaaa

SEQ ID NO: 6236 - DNA, 11 bp, Homo sapiens
ctgaaaaccac

SEQ ID NO: 6237 - DNA, 11 bp, Homo sapiens
tgctgaggaag

SEQ ID NO: 6238 - DNA, 11 bp, Homo sapiens
ggtacactgcg

SEQ ID NO: 6239 - DNA, 11 bp, Homo sapiens
tacatatggaa

SEQ ID NO: 6240 - DNA, 11 bp, Homo sapiens
tctgcttttga

SEQ ID NO: 6241 - DNA, 11 bp, Homo sapiens
acagccaagag

SEQ ID NO: 6242 - DNA, 11 bp, Homo sapiens
ggcttgctgac

SEQ ID NO: 6243 - DNA, 11 bp, Homo sapiens
gattacctgtg

SEQ ID NO: 6244 - DNA, 11 bp, Homo sapiens
tccgtggttgg

SEQ ID NO: 6245 - DNA, 11 bp, Homo sapiens
cagccttggac

SEQ ID NO: 6246 - DNA, 11 bp, Homo sapiens
acagggtgacc

SEQ ID NO: 6247 - DNA, 11 bp, Homo sapiens
tccctgtacat

SEQ ID NO: 6248 - DNA, 11 bp, Homo sapiens
ttatggatctc

SEQ ID NO: 6249 - DNA, 11 bp, Homo sapiens
actctgccaag

SEQ ID NO: 6250 - DNA, 11 bp, Homo sapiens
caaatgaggag

SEQ ID NO: 6251 - DNA, 11 bp, Homo sapiens
ttcctcgggca

SEQ ID NO: 6252 - DNA, 11 bp, Homo sapiens
ttaaatgcaaa

SEQ ID NO: 6253 - DNA, 11 bp, Homo sapiens
tctggaccggc

SEQ ID NO: 6254 - DNA, 11 bp, Homo sapiens
attgatgacgg

SEQ ID NO: 6255 - DNA, 11 bp, Homo sapiens
accttatcaac

SEQ ID NO: 6256 - DNA, 11 bp, Homo sapiens
cctgggggtgc

SEQ ID NO: 6257 - DNA, 11 bp, Homo sapiens
acagcgtctgc

SEQ ID NO: 6258 - DNA, 11 bp, Homo sapiens
gcacagagccg

SEQ ID NO: 6259 - DNA, 11 bp, Homo sapiens
gggatggagaa

SEQ ID NO: 6260 - DNA, 11 bp, Homo sapiens
tttgttgcttt

SEQ ID NO: 6261 - DNA, 11 bp, Homo sapiens
gattttctact

SEQ ID NO: 6262 - DNA, 11 bp, Homo sapiens
ggctcagggct

SEQ ID NO: 6263 - DNA, 11 bp, Homo sapiens
tacttggtctt

SEQ ID NO: 6264 - DNA, 11 bp, Homo sapiens
ttctattttgt

SEQ ID NO: 6265 - DNA, 11 bp, Homo sapiens
aataaaggcta

SEQ ID NO: 6266 - DNA, 11 bp, Homo sapiens
ctgttgattgc

SEQ ID NO: 6267 - DNA, 11 bp, Homo sapiens
aaacccgaaga

SEQ ID NO: 6268 - DNA, 11 bp, Homo sapiens
gaaatttaaag

SEQ ID NO: 6269 - DNA, 11 bp, Homo sapiens
cgcaagctggt

SEQ ID NO: 6270 - DNA, 11 bp, Homo sapiens
aagggagggtc

SEQ ID NO: 6271 - DNA, 11 bp, Homo sapiens
gtctactcctc

SEQ ID NO: 6272 - DNA, 11 bp, Homo sapiens
cgtcccggagc

SEQ ID NO: 6273 - DNA, 11 bp, Homo sapiens
ggaccaggctg

SEQ ID NO: 6274 - DNA, 11 bp, Homo sapiens
cttattcctta

SEQ ID NO: 6275 - DNA, 11 bp, Homo sapiens
cactgcaaggc

SEQ ID NO: 6276 - DNA, 11 bp, Homo sapiens
gcaacacatct

SEQ ID NO: 6277 - DNA, 11 bp, Homo sapiens
gcttccggccc

SEQ ID NO: 6278 - DNA, 11 bp, Homo sapiens
aagatcattga

SEQ ID NO: 6279 - DNA, 11 bp, Homo sapiens
gtcacaacctg

SEQ ID NO: 6280 - DNA, 11 bp, Homo sapiens
agtgaccgaag

SEQ ID NO: 6281 - DNA, 11 bp, Homo sapiens
taatttttcta

SEQ ID NO: 6282 - DNA, 11 bp, Homo sapiens
cagttctctgt

SEQ ID NO: 6283 - DNA, 11 bp, Homo sapiens
ggctggtctgg

SEQ ID NO: 6284 - DNA, 11 bp, Homo sapiens
agccctccctg

SEQ ID NO: 6285 - DNA, 11 bp, Homo sapiens
caggctttttg

SEQ ID NO: 6286 - DNA, 11 bp, Homo sapiens
gaaaagccttc

SEQ ID NO: 6287 - DNA, 11 bp, Homo sapiens
gttgaaactca

SEQ ID NO: 6288 - DNA, 11 bp, Homo sapiens
gtgcctaggag

SEQ ID NO: 6289 - DNA, 11 bp, Homo sapiens
ggcaacaaaag

SEQ ID NO: 6290 - DNA, 11 bp, Homo sapiens
atacatttagg

SEQ ID NO: 6291 - DNA, 11 bp, Homo sapiens
caatttaagtg

SEQ ID NO: 6292 - DNA, 11 bp, Homo sapiens
ctcgctccagg

SEQ ID NO: 6293 - DNA, 11 bp, Homo sapiens
atgggtcagaa

SEQ ID NO: 6294 - DNA, 11 bp, Homo sapiens
agtgggtattt

SEQ ID NO: 6295 - DNA, 11 bp, Homo sapiens
gattggcggct

SEQ ID NO: 6296 - DNA, 11 bp, Homo sapiens
ggaagtgcaaa

SEQ ID NO: 6297 - DNA, 11 bp, Homo sapiens
ggataaatgcc

SEQ ID NO: 6298 - DNA, 11 bp, Homo sapiens
tgtttgcataa

SEQ ID NO: 6299 - DNA, 11 bp, Homo sapiens
attcaccccct

SEQ ID NO: 6300 - DNA, 11 bp, Homo sapiens
cttataataag

SEQ ID NO: 6301 - DNA, 11 bp, Homo sapiens
cttttttctgt

SEQ ID NO: 6302 - DNA, 11 bp, Homo sapiens
aagctccctgt

SEQ ID NO: 6303 - DNA, 11 bp, Homo sapiens
caatcagaatc

SEQ ID NO: 6304 - DNA, 11 bp, Homo sapiens
ctggccccgag

SEQ ID NO: 6305 - DNA, 11 bp, Homo sapiens
tacgttgcagc

SEQ ID NO: 6306 - DNA, 11 bp, Homo sapiens
aatgactgaat

SEQ ID NO: 6307 - DNA, 11 bp, Homo sapiens
cagtgttgggg

SEQ ID NO: 6308 - DNA, 11 bp, Homo sapiens
gtttgcaagtg

SEQ ID NO: 6309 - DNA, 11 bp, Homo sapiens
ggtgaagagga

SEQ ID NO: 6310 - DNA, 11 bp, Homo sapiens
tgcttcatctg

SEQ ID NO: 6311 - DNA, 11 bp, Homo sapiens
ccctcctccgt

SEQ ID NO: 6312 - DNA, 11 bp, Homo sapiens
aggtgcagagg

SEQ ID NO: 6313 - DNA, 11 bp, Homo sapiens
tgctttgcttc

SEQ ID NO: 6314 - DNA, 11 bp, Homo sapiens
ttttgtacttg

SEQ ID NO: 6315 - DNA, 11 bp, Homo sapiens
agaagtactga

SEQ ID NO: 6316 - DNA, 11 bp, Homo sapiens
ggcggctgtgg

SEQ ID NO: 6317 - DNA, 11 bp, Homo sapiens
gcctgagggcc

SEQ ID NO: 6318 - DNA, 11 bp, Homo sapiens
ttgtgtgtacc

SEQ ID NO: 6319 - DNA, 11 bp, Homo sapiens
gagagaaaatt

SEQ ID NO: 6320 - DNA, 11 bp, Homo sapiens
aaattgttcca

SEQ ID NO: 6321 - DNA, 11 bp, Homo sapiens
aacagctggaa

SEQ ID NO: 6322 - DNA, 11 bp, Homo sapiens
aataaaagacc

SEQ ID NO: 6323 - DNA, 11 bp, Homo sapiens
tctgctaaaga

SEQ ID NO: 6324 - DNA, 11 bp, Homo sapiens
gactctctgtt

SEQ ID NO: 6325 - DNA, 11 bp, Homo sapiens
aaaggttggtt

SEQ ID NO: 6326 - DNA, 11 bp, Homo sapiens
gcttttaagga

SEQ ID NO: 6327 - DNA, 11 bp, Homo sapiens
aagtcattcag

SEQ ID NO: 6328 - DNA, 11 bp, Homo sapiens
gtgcttgtact

SEQ ID NO: 6329 - DNA, 11 bp, Homo sapiens
aaggatgcggt

SEQ ID NO: 6330 - DNA, 11 bp, Homo sapiens
ttttatgggta

SEQ ID NO: 6331 - DNA, 11 bp, Homo sapiens
cctcccagcaa

SEQ ID NO: 6332 - DNA, 11 bp, Homo sapiens
ctgtttaaact

SEQ ID NO: 6333 - DNA, 11 bp, Homo sapiens
tagtcatcaag

SEQ ID NO: 6334 - DNA, 11 bp, Homo sapiens
gcaatgcaaaa

SEQ ID NO: 6335 - DNA, 11 bp, Homo sapiens
tctgcactgag

SEQ ID NO: 6336 - DNA, 11 bp, Homo sapiens
gccgggcgcgg

SEQ ID NO: 6337 - DNA, 11 bp, Homo sapiens
cacaaaatctc

SEQ ID NO: 6338 - DNA, 11 bp, Homo sapiens
gattgtgcaag

SEQ ID NO: 6339 - DNA, 11 bp, Homo sapiens
ttttgaagcag

SEQ ID NO: 6340 - DNA, 11 bp, Homo sapiens
gagcagctgga

SEQ ID NO: 6341 - DNA, 11 bp, Homo sapiens
tttttgataaa

SEQ ID NO: 6342 - DNA, 11 bp, Homo sapiens
gccgaggaagg

SEQ ID NO: 6343 - DNA, 11 bp, Homo sapiens
gttgtctttgg

SEQ ID NO: 6344 - DNA, 11 bp, Homo sapiens
agcaagtctct

SEQ ID NO: 6345 - DNA, 11 bp, Homo sapiens
cagtgaatgaa

SEQ ID NO: 6346 - DNA, 11 bp, Homo sapiens
cctgagggtac

SEQ ID NO: 6347 - DNA, 11 bp, Homo sapiens
cagctctgaga

SEQ ID NO: 6348 - DNA, 11 bp, Homo sapiens
tgtaacaataa

SEQ ID NO: 6349 - DNA, 11 bp, Homo sapiens
tatctgtctac

SEQ ID NO: 6350 - DNA, 11 bp, Homo sapiens
aagctggagga

SEQ ID NO: 6351 - DNA, 11 bp, Homo sapiens
gcctctgccag

SEQ ID NO: 6352 - DNA, 11 bp, Homo sapiens
atgaaaagaaa

SEQ ID NO: 6353 - DNA, 11 bp, Homo sapiens
ttgttctttgt

SEQ ID NO: 6354 - DNA, 11 bp, Homo sapiens
tcgttgtttaa

SEQ ID NO: 6355 - DNA, 11 bp, Homo sapiens
aggcactggcc

SEQ ID NO: 6356 - DNA, 11 bp, Homo sapiens
ctgagttaggt

SEQ ID NO: 6357 - DNA, 11 bp, Homo sapiens
ctcccggcgat

SEQ ID NO: 6358 - DNA, 11 bp, Homo sapiens
tcagatccgtc

SEQ ID NO: 6359 - DNA, 11 bp, Homo sapiens
gggcgagaaca

SEQ ID NO: 6360 - DNA, 11 bp, Homo sapiens
aggaatgttaa

SEQ ID NO: 6361 - DNA, 11 bp, Homo sapiens
acattccaagt

SEQ ID NO: 6362 - DNA, 11 bp, Homo sapiens
aatacttaaat

SEQ ID NO: 6363 - DNA, 11 bp, Homo sapiens
cagcacattat

SEQ ID NO: 6364 - DNA, 11 bp, Homo sapiens
cagagtgactg

SEQ ID NO: 6365 - DNA, 11 bp, Homo sapiens
gaaattaggga

SEQ ID NO: 6366 - DNA, 11 bp, Homo sapiens
ttctctccaac

SEQ ID NO: 6367 - DNA, 11 bp, Homo sapiens
ttcctccaccc

SEQ ID NO: 6368 - DNA, 11 bp, Homo sapiens
attttcaaaaa

SEQ ID NO: 6369 - DNA, 11 bp, Homo sapiens
gcacaggccag

SEQ ID NO: 6370 - DNA, 11 bp, Homo sapiens
accattctgct

SEQ ID NO: 6371 - DNA, 11 bp, Homo sapiens
gtttatggata

SEQ ID NO: 6372 - DNA, 11 bp, Homo sapiens
ctgtcatttgt

SEQ ID NO: 6373 - DNA, 11 bp, Homo sapiens
cctggaagagg

SEQ ID NO: 6374 - DNA, 11 bp, Homo sapiens
ctgtgctcgga

SEQ ID NO: 6375 - DNA, 11 bp, Homo sapiens
gattaagtgag

SEQ ID NO: 6376 - DNA, 11 bp, Homo sapiens
tgggcgccttt

SEQ ID NO: 6377 - DNA, 11 bp, Homo sapiens
gaggtgccgga

SEQ ID NO: 6378 - DNA, 11 bp, Homo sapiens
ctgcggtggcg

SEQ ID NO: 6379 - DNA, 11 bp, Homo sapiens
aaaacatccag

SEQ ID NO: 6380 - DNA, 11 bp, Homo sapiens
gttggcctggt

SEQ ID NO: 6381 - DNA, 11 bp, Homo sapiens
acgagctggag

SEQ ID NO: 6382 - DNA, 11 bp, Homo sapiens
ggcaggctgtg

SEQ ID NO: 6383 - DNA, 11 bp, Homo sapiens
gtgttcccata

SEQ ID NO: 6384 - DNA, 11 bp, Homo sapiens
ttcattaaaaa

SEQ ID NO: 6385 - DNA, 11 bp, Homo sapiens
gacatttgtcc

SEQ ID NO: 6386 - DNA, 11 bp, Homo sapiens
cggtttgcaga

SEQ ID NO: 6387 - DNA, 11 bp, Homo sapiens
gcaaacaatca

SEQ ID NO: 6388 - DNA, 11 bp, Homo sapiens
aactccttcgt

SEQ ID NO: 6389 - DNA, 11 bp, Homo sapiens
tctcaagaagc

SEQ ID NO: 6390 - DNA, 11 bp, Homo sapiens
gccgtgtccgc

SEQ ID NO: 6391 - DNA, 11 bp, Homo sapiens
ggctcctggct

SEQ ID NO: 6392 - DNA, 11 bp, Homo sapiens
ttcacagtggc

SEQ ID NO: 6393 - DNA, 11 bp, Homo sapiens
tggctgtgtgg

SEQ ID NO: 6394 - DNA, 11 bp, Homo sapiens
tacaaaagtgg

SEQ ID NO: 6395 - DNA, 11 bp, Homo sapiens
ggcaggcgggt

SEQ ID NO: 6396 - DNA, 11 bp, Homo sapiens
tggccccaggt

SEQ ID NO: 6397 - DNA, 11 bp, Homo sapiens
atcagtggctt

SEQ ID NO: 6398 - DNA, 11 bp, Homo sapiens
gcctgcagtct

SEQ ID NO: 6399 - DNA, 11 bp, Homo sapiens
gaaaggtctgg

SEQ ID NO: 6400 - DNA, 11 bp, Homo sapiens
aggaatgcttt

SEQ ID NO: 6401 - DNA, 11 bp, Homo sapiens
gctgctggtgt

SEQ ID NO: 6402 - DNA, 11 bp, Homo sapiens
tggaacaggat

SEQ ID NO: 6403 - DNA, 11 bp, Homo sapiens
ctacaccagtt

SEQ ID NO: 6404 - DNA, 11 bp, Homo sapiens
caggatgacgc

SEQ ID NO: 6405 - DNA, 11 bp, Homo sapiens
agggcagtact

SEQ ID NO: 6406 - DNA, 11 bp, Homo sapiens
cccatcgtctt

SEQ ID NO: 6407 - DNA, 11 bp, Homo sapiens
cctccagcagc

SEQ ID NO: 6408 - DNA, 11 bp, Homo sapiens
gagttcgacct

SEQ ID NO: 6409 - DNA, 11 bp, Homo sapiens
cccgacgtgcc

SEQ ID NO: 6410 - DNA, 11 bp, Homo sapiens
gcctcttgaag

SEQ ID NO: 6411 - DNA, 11 bp, Homo sapiens
cacacccctga

SEQ ID NO: 6412 - DNA, 11 bp, Homo sapiens
taataaagcat

SEQ ID NO: 6413 - DNA, 11 bp, Homo sapiens
gggcaagccag

SEQ ID NO: 6414 - DNA, 11 bp, Homo sapiens
tggaagggcac

SEQ ID NO: 6415 - DNA, 11 bp, Homo sapiens
cctcccccgtc

SEQ ID NO: 6416 - DNA, 11 bp, Homo sapiens
gaggggaaacg

SEQ ID NO: 6417 - DNA, 11 bp, Homo sapiens
ggaggcaggtg

SEQ ID NO: 6418 - DNA, 11 bp, Homo sapiens
acagactgata

SEQ ID NO: 6419 - DNA, 11 bp, Homo sapiens
tggaaagagcc

SEQ ID NO: 6420 - DNA, 11 bp, Homo sapiens
cttggtaattt

SEQ ID NO: 6421 - DNA, 11 bp, Homo sapiens
acctgtaattg

SEQ ID NO: 6422 - DNA, 11 bp, Homo sapiens
tttctgttaaa

SEQ ID NO: 6423 - DNA, 11 bp, Homo sapiens
gttgcagataa

SEQ ID NO: 6424 - DNA, 11 bp, Homo sapiens
aggtcctagcc

SEQ ID NO: 6425 - DNA, 11 bp, Homo sapiens
caatgtgttat

SEQ ID NO: 6426 - DNA, 11 bp, Homo sapiens
cacaggcaaaa

SEQ ID NO: 6427 - DNA, 11 bp, Homo sapiens
ctgcacttact

SEQ ID NO: 6428 - DNA, 11 bp, Homo sapiens
cgcattaaagc

SEQ ID NO: 6429 - DNA, 11 bp, Homo sapiens
aagactggctt

SEQ ID NO: 6430 - DNA, 11 bp, Homo sapiens
gtgatctccgt

SEQ ID NO: 6431 - DNA, 11 bp, Homo sapiens
gccaaaacctt

SEQ ID NO: 6432 - DNA, 11 bp, Homo sapiens
ttctgtgaatc

SEQ ID NO: 6433 - DNA, 11 bp, Homo sapiens
ttacttcccca

SEQ ID NO: 6434 - DNA, 11 bp, Homo sapiens
cccatccgaaa

SEQ ID NO: 6435 - DNA, 11 bp, Homo sapiens
tttcaggggag

SEQ ID NO: 6436 - DNA, 11 bp, Homo sapiens
ggccccggacc

SEQ ID NO: 6437 - DNA, 11 bp, Homo sapiens
ccaagaaagaa

SEQ ID NO: 6438 - DNA, 11 bp, Homo sapiens
gtgctggtgct

SEQ ID NO: 6439 - DNA, 11 bp, Homo sapiens
cctttgtaaaa

SEQ ID NO: 6440 - DNA, 11 bp, Homo sapiens
ttctcaagaaa

SEQ ID NO: 6441 - DNA, 11 bp, Homo sapiens
ctttatgtgat

SEQ ID NO: 6442 - DNA, 11 bp, Homo sapiens
tagacttcctt

SEQ ID NO: 6443 - DNA, 11 bp, Homo sapiens
acatttcaatt

SEQ ID NO: 6444 - DNA, 11 bp, Homo sapiens
catttatcatc

SEQ ID NO: 6445 - DNA, 11 bp, Homo sapiens
gatggctgcct

SEQ ID NO: 6446 - DNA, 11 bp, Homo sapiens
tggaaactttc

SEQ ID NO: 6447 - DNA, 11 bp, Homo sapiens
ctgaaaaaaaa

SEQ ID NO: 6448 - DNA, 11 bp, Homo sapiens
gcagctcctgt

SEQ ID NO: 6449 - DNA, 11 bp, Homo sapiens
gatgctgccaa

SEQ ID NO: 6450 - DNA, 11 bp, Homo sapiens
tgtgctaatat

SEQ ID NO: 6451 - DNA, 11 bp, Homo sapiens
tcctgaaataa

SEQ ID NO: 6452 - DNA, 11 bp, Homo sapiens
cagcatctaat

SEQ ID NO: 6453 - DNA, 11 bp, Homo sapiens
gagagtaacag

SEQ ID NO: 6454 - DNA, 11 bp, Homo sapiens
tttaattgtga

SEQ ID NO: 6455 - DNA, 11 bp, Homo sapiens
gtgacctcctt

SEQ ID NO: 6456 - DNA, 11 bp, Homo sapiens
gtttttgcttc

SEQ ID NO: 6457 - DNA, 11 bp, Homo sapiens
aggcattgaaa

SEQ ID NO: 6458 - DNA, 11 bp, Homo sapiens
gaatgaggaca

SEQ ID NO: 6459 - DNA, 11 bp, Homo sapiens
gatctcgcaaa

SEQ ID NO: 6460 - DNA, 11 bp, Homo sapiens
cagtgggtgtt

SEQ ID NO: 6461 - DNA, 11 bp, Homo sapiens
tggacacaagc

SEQ ID NO: 6462 - DNA, 11 bp, Homo sapiens
tgtgatcacaa

SEQ ID NO: 6463 - DNA, 11 bp, Homo sapiens
tgtgctgtgct

SEQ ID NO: 6464 - DNA, 11 bp, Homo sapiens
gacaatgagaa

SEQ ID NO: 6465 - DNA, 11 bp, Homo sapiens
ttccctgcaag

SEQ ID NO: 6466 - DNA, 11 bp, Homo sapiens
aaacaaatcac

SEQ ID NO: 6467 - DNA, 11 bp, Homo sapiens
gttcactgcag

SEQ ID NO: 6468 - DNA, 11 bp, Homo sapiens
ttacactaata

SEQ ID NO: 6469 - DNA, 11 bp, Homo sapiens
gtaggaaagct

SEQ ID NO: 6470 - DNA, 11 bp, Homo sapiens
gcgacgaggcg

SEQ ID NO: 6471 - DNA, 11 bp, Homo sapiens
aagtgattctg

SEQ ID NO: 6472 - DNA, 11 bp, Homo sapiens
ggccttttttt

SEQ ID NO: 6473 - DNA, 11 bp, Homo sapiens
aatattgagaa

SEQ ID NO: 6474 - DNA, 11 bp, Homo sapiens
tcattgtaatg

SEQ ID NO: 6475 - DNA, 11 bp, Homo sapiens
gtggccacggc

SEQ ID NO: 6476 - DNA, 11 bp, Homo sapiens
agacagagtgg

SEQ ID NO: 6477 - DNA, 11 bp, Homo sapiens
atgcaagagag

SEQ ID NO: 6478 - DNA, 11 bp, Homo sapiens
ggaggaattca

SEQ ID NO: 6479 - DNA, 11 bp, Homo sapiens
gcgggagcggg

SEQ ID NO: 6480 - DNA, 11 bp, Homo sapiens
aggattaaaaa

SEQ ID NO: 6481 - DNA, 11 bp, Homo sapiens
aagagctaatg

SEQ ID NO: 6482 - DNA, 11 bp, Homo sapiens
ggaagagaagg

SEQ ID NO: 6483 - DNA, 11 bp, Homo sapiens
ggctccttgag

SEQ ID NO: 6484 - DNA, 11 bp, Homo sapiens
tgcctcgtgaa

SEQ ID NO: 6485 - DNA, 11 bp, Homo sapiens
agaaggccttg

SEQ ID NO: 6486 - DNA, 11 bp, Homo sapiens
cttgggaggcg

SEQ ID NO: 6487 - DNA, 11 bp, Homo sapiens
cccggtgtgtg

SEQ ID NO: 6488 - DNA, 11 bp, Homo sapiens
cccggctctta

SEQ ID NO: 6489 - DNA, 11 bp, Homo sapiens
ggtacccattt

SEQ ID NO: 6490 - DNA, 11 bp, Homo sapiens
ggtacaaataa

SEQ ID NO: 6491 - DNA, 11 bp, Homo sapiens
cttctgcaaat

SEQ ID NO: 6492 - DNA, 11 bp, Homo sapiens
acccagcgggc

SEQ ID NO: 6493 - DNA, 11 bp, Homo sapiens
ggagcactgtg

SEQ ID NO: 6494 - DNA, 11 bp, Homo sapiens
gagaattaatc

SEQ ID NO: 6495 - DNA, 11 bp, Homo sapiens
gaaaaaaaaaa

SEQ ID NO: 6496 - DNA, 11 bp, Homo sapiens
gtgggtgtcct

SEQ ID NO: 6497 - DNA, 11 bp, Homo sapiens
accccacccag

SEQ ID NO: 6498 - DNA, 11 bp, Homo sapiens
gccaagcctga

SEQ ID NO: 6499 - DNA, 11 bp, Homo sapiens
aaaggaaagtc

SEQ ID NO: 6500 - DNA, 11 bp, Homo sapiens
ggggtaagaaa

SEQ ID NO: 6501 - DNA, 11 bp, Homo sapiens
tgtcatcacag

SEQ ID NO: 6502 - DNA, 11 bp, Homo sapiens
gagaacgggga

SEQ ID NO: 6503 - DNA, 11 bp, Homo sapiens
gactctgggat

SEQ ID NO: 6504 - DNA, 11 bp, Homo sapiens
aaagggggcag

SEQ ID NO: 6505 - DNA, 11 bp, Homo sapiens
gtgtaataaga

SEQ ID NO: 6506 - DNA, 11 bp, Homo sapiens
tgtattacagt

SEQ ID NO: 6507 - DNA, 11 bp, Homo sapiens
cctgaagaagt

SEQ ID NO: 6508 - DNA, 11 bp, Homo sapiens
cacgttcccta

SEQ ID NO: 6509 - DNA, 11 bp, Homo sapiens
agggatggccc

SEQ ID NO: 6510 - DNA, 11 bp, Homo sapiens
ctctcaatata

SEQ ID NO: 6511 - DNA, 11 bp, Homo sapiens
taaactttgta

SEQ ID NO: 6512 - DNA, 11 bp, Homo sapiens
ctatgggattt

SEQ ID NO: 6513 - DNA, 11 bp, Homo sapiens
tactgtagtca

SEQ ID NO: 6514 - DNA, 11 bp, Homo sapiens
ctggaggctgc

SEQ ID NO: 6515 - DNA, 11 bp, Homo sapiens
gcccctgaagg

SEQ ID NO: 6516 - DNA, 11 bp, Homo sapiens
gagtctgaggg

SEQ ID NO: 6517 - DNA, 11 bp, Homo sapiens
gtgcgctaggg

SEQ ID NO: 6518 - DNA, 11 bp, Homo sapiens
gaaaagggttt

SEQ ID NO: 6519 - DNA, 11 bp, Homo sapiens
tgttaatgtta

SEQ ID NO: 6520 - DNA, 11 bp, Homo sapiens
ttcagtgccca

SEQ ID NO: 6521 - DNA, 11 bp, Homo sapiens
ggcagcctggt

SEQ ID NO: 6522 - DNA, 11 bp, Homo sapiens
actacagcacg

SEQ ID NO: 6523 - DNA, 11 bp, Homo sapiens
gacttctgagc

SEQ ID NO: 6524 - DNA, 11 bp, Homo sapiens
ttggtgcttgg

SEQ ID NO: 6525 - DNA, 11 bp, Homo sapiens
actggaacgaa

SEQ ID NO: 6526 - DNA, 11 bp, Homo sapiens
gcttgatgtga

SEQ ID NO: 6527 - DNA, 11 bp, Homo sapiens
aagctgctgga

SEQ ID NO: 6528 - DNA, 11 bp, Homo sapiens
ctgggactgac

SEQ ID NO: 6529 - DNA, 11 bp, Homo sapiens
tgggtgggggg

SEQ ID NO: 6530 - DNA, 11 bp, Homo sapiens
gaccctgccct

SEQ ID NO: 6531 - DNA, 11 bp, Homo sapiens
gttcgtgccaa

SEQ ID NO: 6532 - DNA, 11 bp, Homo sapiens
gaccagaaaaa

SEQ ID NO: 6533 - DNA, 11 bp, Homo sapiens
gtgaaggcagt

SEQ ID NO: 6534 - DNA, 11 bp, Homo sapiens
cagatctttgt

SEQ ID NO: 6535 - DNA, 11 bp, Homo sapiens
tgggctctgaa

SEQ ID NO: 6536 - DNA, 11 bp, Homo sapiens
cttcgcgatgg

SEQ ID NO: 6537 - DNA, 11 bp, Homo sapiens
gaggtccttcg

SEQ ID NO: 6538 - DNA, 11 bp, Homo sapiens
gtacattgtaa

SEQ ID NO: 6539 - DNA, 11 bp, Homo sapiens
gttaattgcta

SEQ ID NO: 6540 - DNA, 11 bp, Homo sapiens
gcttataaaaa

SEQ ID NO: 6541 - DNA, 11 bp, Homo sapiens
catacacacac

SEQ ID NO: 6542 - DNA, 11 bp, Homo sapiens
tttctctccct

SEQ ID NO: 6543 - DNA, 11 bp, Homo sapiens
cccaataaact

SEQ ID NO: 6544 - DNA, 11 bp, Homo sapiens
taacagttgtg

SEQ ID NO: 6545 - DNA, 11 bp, Homo sapiens
ctgccataact

SEQ ID NO: 6546 - DNA, 11 bp, Homo sapiens
ttctctcccca

SEQ ID NO: 6547 - DNA, 11 bp, Homo sapiens
cccagggagaa

SEQ ID NO: 6548 - DNA, 11 bp, Homo sapiens
tggcctgccca

SEQ ID NO: 6549 - DNA, 11 bp, Homo sapiens
ttacctccttc

SEQ ID NO: 6550 - DNA, 11 bp, Homo sapiens
gccagcccagc

SEQ ID NO: 6551 - DNA, 11 bp, Homo sapiens
atctctatccc

SEQ ID NO: 6552 - DNA, 11 bp, Homo sapiens
caccggacact

SEQ ID NO: 6553 - DNA, 11 bp, Homo sapiens
gaatttgtgta

SEQ ID NO: 6554 - DNA, 11 bp, Homo sapiens
aaattaaaaca

SEQ ID NO: 6555 - DNA, 11 bp, Homo sapiens
tttttcaatca

SEQ ID NO: 6556 - DNA, 11 bp, Homo sapiens
cctctggaggc

SEQ ID NO: 6557 - DNA, 11 bp, Homo sapiens
cctcccctgca

SEQ ID NO: 6558 - DNA, 11 bp, Homo sapiens
catccaaaaca

SEQ ID NO: 6559 - DNA, 11 bp, Homo sapiens
gtctcatttga

SEQ ID NO: 6560 - DNA, 11 bp, Homo sapiens
acacctctaaa

SEQ ID NO: 6561 - DNA, 11 bp, Homo sapiens
atggagacttc

SEQ ID NO: 6562 - DNA, 11 bp, Homo sapiens
tgatcacctat

SEQ ID NO: 6563 - DNA, 11 bp, Homo sapiens
ggaataaatta

SEQ ID NO: 6564 - DNA, 11 bp, Homo sapiens
aactgtccttc

SEQ ID NO: 6565 - DNA, 11 bp, Homo sapiens
atcttgttact

SEQ ID NO: 6566 - DNA, 11 bp, Homo sapiens
atggctggtat

SEQ ID NO: 6567 - DNA, 11 bp, Homo sapiens
ttctcttctcc

SEQ ID NO: 6568 - DNA, 11 bp, Homo sapiens
tacactgcttt

SEQ ID NO: 6569 - DNA, 11 bp, Homo sapiens
atggatgcact

SEQ ID NO: 6570 - DNA, 11 bp, Homo sapiens
acaaacaaaag

SEQ ID NO: 6571 - DNA, 11 bp, Homo sapiens
gctccagccat

SEQ ID NO: 6572 - DNA, 11 bp, Homo sapiens
acctctggctt

SEQ ID NO: 6573 - DNA, 11 bp, Homo sapiens
ggatgtagaga

SEQ ID NO: 6574 - DNA, 11 bp, Homo sapiens
ctttcagatgt

SEQ ID NO: 6575 - DNA, 11 bp, Homo sapiens
gagggtgccaa

SEQ ID NO: 6576 - DNA, 11 bp, Homo sapiens
gcttccatctt

SEQ ID NO: 6577 - DNA, 11 bp, Homo sapiens
gcacctcagcc

SEQ ID NO: 6578 - DNA, 11 bp, Homo sapiens
cctacagataa

SEQ ID NO: 6579 - DNA, 11 bp, Homo sapiens
aaggagcggga

SEQ ID NO: 6580 - DNA, 11 bp, Homo sapiens
ccaaggaatgg

SEQ ID NO: 6581 - DNA, 11 bp, Homo sapiens
attcagccacg

SEQ ID NO: 6582 - DNA, 11 bp, Homo sapiens
agttttatttg

SEQ ID NO: 6583 - DNA, 11 bp, Homo sapiens
tgaggaagaca

SEQ ID NO: 6584 - DNA, 11 bp, Homo sapiens
aggtccctgtc

SEQ ID NO: 6585 - DNA, 11 bp, Homo sapiens
cgctttgcgcg

SEQ ID NO: 6586 - DNA, 11 bp, Homo sapiens
aagaagataga

SEQ ID NO: 6587 - DNA, 11 bp, Homo sapiens
ctgagacaaag

SEQ ID NO: 6588 - DNA, 11 bp, Homo sapiens
gaaacaagatg

SEQ ID NO: 6589 - DNA, 11 bp, Homo sapiens
gtgcgctgagc

SEQ ID NO: 6590 - DNA, 11 bp, Homo sapiens
tgtgatcagac

SEQ ID NO: 6591 - DNA, 11 bp, Homo sapiens
gtgatggtgta

SEQ ID NO: 6592 - DNA, 11 bp, Homo sapiens
ttttgtgtgaa

SEQ ID NO: 6593 - DNA, 11 bp, Homo sapiens
gagtgagtgag

SEQ ID NO: 6594 - DNA, 11 bp, Homo sapiens
ggagggatcag

SEQ ID NO: 6595 - DNA, 11 bp, Homo sapiens
gttaactggga

SEQ ID NO: 6596 - DNA, 11 bp, Homo sapiens
gcaggaacagc

SEQ ID NO: 6597 - DNA, 11 bp, Homo sapiens
taagttccttc

SEQ ID NO: 6598 - DNA, 11 bp, Homo sapiens
tgtacattctg

SEQ ID NO: 6599 - DNA, 11 bp, Homo sapiens
cgggatgcaga

SEQ ID NO: 6600 - DNA, 11 bp, Homo sapiens
aagattggggt

SEQ ID NO: 6601 - DNA, 11 bp, Homo sapiens
gactcactttt

SEQ ID NO: 6602 - DNA, 11 bp, Homo sapiens
gtggtacagga

SEQ ID NO: 6603 - DNA, 11 bp, Homo sapiens
ccaagtttttt

SEQ ID NO: 6604 - DNA, 11 bp, Homo sapiens
ccttgaccaat

SEQ ID NO: 6605 - DNA, 11 bp, Homo sapiens
gaatcattttg

SEQ ID NO: 6606 - DNA, 11 bp, Homo sapiens
cgctgtggggt

SEQ ID NO: 6607 - DNA, 11 bp, Homo sapiens
cggggagatga

SEQ ID NO: 6608 - DNA, 11 bp, Homo sapiens
tccgcgagaag

SEQ ID NO: 6609 - DNA, 11 bp, Homo sapiens
tacaataattt

SEQ ID NO: 6610 - DNA, 11 bp, Homo sapiens
ctgaccccctt

SEQ ID NO: 6611 - DNA, 11 bp, Homo sapiens
ctttccccttt

SEQ ID NO: 6612 - DNA, 11 bp, Homo sapiens
gggcccttcct

SEQ ID NO: 6613 - DNA, 11 bp, Homo sapiens
aaccagtttgt

SEQ ID NO: 6614 - DNA, 11 bp, Homo sapiens
gaactcaggcc

SEQ ID NO: 6615 - DNA, 11 bp, Homo sapiens
ctgaggcctgg

SEQ ID NO: 6616 - DNA, 11 bp, Homo sapiens
ttagttacctt

SEQ ID NO: 6617 - DNA, 11 bp, Homo sapiens
ggtagcccacg

SEQ ID NO: 6618 - DNA, 11 bp, Homo sapiens
acagctttgta

SEQ ID NO: 6619 - DNA, 11 bp, Homo sapiens
ttcagggcttc

SEQ ID NO: 6620 - DNA, 11 bp, Homo sapiens
ggaatgtacgt

SEQ ID NO: 6621 - DNA, 11 bp, Homo sapiens
tctccaggaac

SEQ ID NO: 6622 - DNA, 11 bp, Homo sapiens
aagtgaggaga

SEQ ID NO: 6623 - DNA, 11 bp, Homo sapiens
ctggcgccgat

SEQ ID NO: 6624 - DNA, 11 bp, Homo sapiens
gtgtggtggtg

SEQ ID NO: 6625 - DNA, 11 bp, Homo sapiens
tggaagggctc

SEQ ID NO: 6626 - DNA, 11 bp, Homo sapiens
tagtaagtcat

SEQ ID NO: 6627 - DNA, 11 bp, Homo sapiens
tctcccttcaa

SEQ ID NO: 6628 - DNA, 11 bp, Homo sapiens
ggcagataggt

SEQ ID NO: 6629 - DNA, 11 bp, Homo sapiens
cagattgtgaa

SEQ ID NO: 6630 - DNA, 11 bp, Homo sapiens
gaccctgggga

SEQ ID NO: 6631 - DNA, 11 bp, Homo sapiens
tggcggagtcc

SEQ ID NO: 6632 - DNA, 11 bp, Homo sapiens
gatggtcagtc

SEQ ID NO: 6633 - DNA, 11 bp, Homo sapiens
ggcttggttta

SEQ ID NO: 6634 - DNA, 11 bp, Homo sapiens
tagctctatgg

SEQ ID NO: 6635 - DNA, 11 bp, Homo sapiens
gaattttataa

SEQ ID NO: 6636 - DNA, 11 bp, Homo sapiens
cggctgaattc

SEQ ID NO: 6637 - DNA, 11 bp, Homo sapiens
tgggtgagcca

SEQ ID NO: 6638 - DNA, 11 bp, Homo sapiens
gaaggcatcct

SEQ ID NO: 6639 - DNA, 11 bp, Homo sapiens
gggccccgcag

SEQ ID NO: 6640 - DNA, 11 bp, Homo sapiens
gcccgcagggt

SEQ ID NO: 6641 - DNA, 11 bp, Homo sapiens
gacagatggac

SEQ ID NO: 6642 - DNA, 11 bp, Homo sapiens
gagtagaggcc

SEQ ID NO: 6643 - DNA, 11 bp, Homo sapiens
gcagcccgcgg

SEQ ID NO: 6644 - DNA, 11 bp, Homo sapiens
gtgattgttca

SEQ ID NO: 6645 - DNA, 11 bp, Homo sapiens
ctcctgaaggc

SEQ ID NO: 6646 - DNA, 11 bp, Homo sapiens
gataggtcggg

SEQ ID NO: 6647 - DNA, 11 bp, Homo sapiens
ttgtttgtaaa

SEQ ID NO: 6648 - DNA, 11 bp, Homo sapiens
gtataatttgt

SEQ ID NO: 6649 - DNA, 11 bp, Homo sapiens
aaaaataaagg

SEQ ID NO: 6650 - DNA, 11 bp, Homo sapiens
gcctgtatgag

SEQ ID NO: 6651 - DNA, 11 bp, Homo sapiens
tttctgtatgt

SEQ ID NO: 6652 - DNA, 11 bp, Homo sapiens
tcttgtgcata

SEQ ID NO: 6653 - DNA, 11 bp, Homo sapiens
tcatcttcaac

SEQ ID NO: 6654 - DNA, 11 bp, Homo sapiens
tcactttcttt

SEQ ID NO: 6655 - DNA, 11 bp, Homo sapiens
tggaggggcca

SEQ ID NO: 6656 - DNA, 11 bp, Homo sapiens
attgtgaacaa

SEQ ID NO: 6657 - DNA, 11 bp, Homo sapiens
tctgtttccag

SEQ ID NO: 6658 - DNA, 11 bp, Homo sapiens
tggaatgagcg

SEQ ID NO: 6659 - DNA, 11 bp, Homo sapiens
gctggagcgcc

SEQ ID NO: 6660 - DNA, 11 bp, Homo sapiens
gctttttagaa

SEQ ID NO: 6661 - DNA, 11 bp, Homo sapiens
aagtttccaat

SEQ ID NO: 6662 - DNA, 11 bp, Homo sapiens
tttccttcctt

SEQ ID NO: 6663 - DNA, 11 bp, Homo sapiens
ccttccaaatt

SEQ ID NO: 6664 - DNA, 11 bp, Homo sapiens
tcctctttcca

SEQ ID NO: 6665 - DNA, 11 bp, Homo sapiens
tgtcctggttg

SEQ ID NO: 6666 - DNA, 11 bp, Homo sapiens
gtggaagacga

SEQ ID NO: 6667 - DNA, 11 bp, Homo sapiens
atttgcctctg

SEQ ID NO: 6668 - DNA, 11 bp, Homo sapiens
ctgggcctctg

SEQ ID NO: 6669 - DNA, 11 bp, Homo sapiens
tctgaatcggg

SEQ ID NO: 6670 - DNA, 11 bp, Homo sapiens
gtgtgaaataa

SEQ ID NO: 6671 - DNA, 11 bp, Homo sapiens
cacggactcgt

SEQ ID NO: 6672 - DNA, 11 bp, Homo sapiens
gcagcaggaag

SEQ ID NO: 6673 - DNA, 11 bp, Homo sapiens
cgggtagtatt

SEQ ID NO: 6674 - DNA, 11 bp, Homo sapiens
aaaatatttta

SEQ ID NO: 6675 - DNA, 11 bp, Homo sapiens
tttgttaattc

SEQ ID NO: 6676 - DNA, 11 bp, Homo sapiens
gtgctgaatgg

SEQ ID NO: 6677 - DNA, 11 bp, Homo sapiens
ggcacctctgc

SEQ ID NO: 6678 - DNA, 11 bp, Homo sapiens
ggtgctggaga

SEQ ID NO: 6679 - DNA, 11 bp, Homo sapiens
aatgctttgtt

SEQ ID NO: 6680 - DNA, 11 bp, Homo sapiens
cggagtccatt

SEQ ID NO: 6681 - DNA, 11 bp, Homo sapiens
cgatggtcccc

SEQ ID NO: 6682 - DNA, 11 bp, Homo sapiens
cagctccgctt

SEQ ID NO: 6683 - DNA, 11 bp, Homo sapiens
ataaaaaaaaa

SEQ ID NO: 6684 - DNA, 11 bp, Homo sapiens
ggacctgcgcc

SEQ ID NO: 6685 - DNA, 11 bp, Homo sapiens
gaaaccctcac

SEQ ID NO: 6686 - DNA, 11 bp, Homo sapiens
gcaaccacgac

SEQ ID NO: 6687 - DNA, 11 bp, Homo sapiens
ggatgcattag

SEQ ID NO: 6688 - DNA, 11 bp, Homo sapiens
gccagcgtcat

SEQ ID NO: 6689 - DNA, 11 bp, Homo sapiens
ccaaacgtgta

SEQ ID NO: 6690 - DNA, 11 bp, Homo sapiens
ttcacaaagga

SEQ ID NO: 6691 - DNA, 11 bp, Homo sapiens
ggtttggctta

SEQ ID NO: 6692 - DNA, 11 bp, Homo sapiens
ggttggcaggg

SEQ ID NO: 6693 - DNA, 11 bp, Homo sapiens
tataatcttta

SEQ ID NO: 6694 - DNA, 11 bp, Homo sapiens
taaaattgctg

SEQ ID NO: 6695 - DNA, 11 bp, Homo sapiens
ccggaatgtgg

SEQ ID NO: 6696 - DNA, 11 bp, Homo sapiens
ttgtattccag

SEQ ID NO: 6697 - DNA, 11 bp, Homo sapiens
gtacgtctggc

SEQ ID NO: 6698 - DNA, 11 bp, Homo sapiens
aaaactttgtc

SEQ ID NO: 6699 - DNA, 11 bp, Homo sapiens
gggagtaatag

SEQ ID NO: 6700 - DNA, 11 bp, Homo sapiens
tttaatttgta

SEQ ID NO: 6701 - DNA, 11 bp, Homo sapiens
aatacttttgt

SEQ ID NO: 6702 - DNA, 11 bp, Homo sapiens
catttcagaga

SEQ ID NO: 6703 - DNA, 11 bp, Homo sapiens
tcaataaagga

SEQ ID NO: 6704 - DNA, 11 bp, Homo sapiens
ggaacttttag

SEQ ID NO: 6705 - DNA, 11 bp, Homo sapiens
ggggcagggcc

SEQ ID NO: 6706 - DNA, 11 bp, Homo sapiens
ttctaacatat

SEQ ID NO: 6707 - DNA, 11 bp, Homo sapiens
gggagggaaga

SEQ ID NO: 6708 - DNA, 11 bp, Homo sapiens
aagatccccgc

SEQ ID NO: 6709 - DNA, 11 bp, Homo sapiens
gtattggcctt

SEQ ID NO: 6710 - DNA, 11 bp, Homo sapiens
ttctcccgctt

SEQ ID NO: 6711 - DNA, 11 bp, Homo sapiens
gagtaaaaaat

SEQ ID NO: 6712 - DNA, 11 bp, Homo sapiens
tacaataaacc

SEQ ID NO: 6713 - DNA, 11 bp, Homo sapiens
ttgaccctggg

SEQ ID NO: 6714 - DNA, 11 bp, Homo sapiens
agcctgactgc

SEQ ID NO: 6715 - DNA, 11 bp, Homo sapiens
gaggatttggg

SEQ ID NO: 6716 - DNA, 11 bp, Homo sapiens
tgctttcaaaa

SEQ ID NO: 6717 - DNA, 11 bp, Homo sapiens
aaagcagttta

SEQ ID NO: 6718 - DNA, 11 bp, Homo sapiens
ctgtactaggt

SEQ ID NO: 6719 - DNA, 11 bp, Homo sapiens
tgggagaagtg

SEQ ID NO: 6720 - DNA, 11 bp, Homo sapiens
tccttgttggc

SEQ ID NO: 6721 - DNA, 11 bp, Homo sapiens
gagactgcttc

SEQ ID NO: 6722 - DNA, 11 bp, Homo sapiens
acaactcaata

SEQ ID NO: 6723 - DNA, 11 bp, Homo sapiens
cgcttttgtag

SEQ ID NO: 6724 - DNA, 11 bp, Homo sapiens
gaggtccctgg

SEQ ID NO: 6725 - DNA, 11 bp, Homo sapiens
attgtttatgg

SEQ ID NO: 6726 - DNA, 11 bp, Homo sapiens
ctgaggcgctt

SEQ ID NO: 6727 - DNA, 11 bp, Homo sapiens
ttcatttgtct

SEQ ID NO: 6728 - DNA, 11 bp, Homo sapiens
gagagcaccct

SEQ ID NO: 6729 - DNA, 11 bp, Homo sapiens
agtggctgccc

SEQ ID NO: 6730 - DNA, 11 bp, Homo sapiens
cccttcactgg

SEQ ID NO: 6731 - DNA, 11 bp, Homo sapiens
gcctgggactc

SEQ ID NO: 6732 - DNA, 11 bp, Homo sapiens
cactcagtgtg

SEQ ID NO: 6733 - DNA, 11 bp, Homo sapiens
tttctaggggt

SEQ ID NO: 6734 - DNA, 11 bp, Homo sapiens
tccaaggaagg

SEQ ID NO: 6735 - DNA, 11 bp, Homo sapiens
gcaaaaccagc

SEQ ID NO: 6736 - DNA, 11 bp, Homo sapiens
gctgttttgtt

SEQ ID NO: 6737 - DNA, 11 bp, Homo sapiens
gagctgttggt

SEQ ID NO: 6738 - DNA, 11 bp, Homo sapiens
catagagccac

SEQ ID NO: 6739 - DNA, 11 bp, Homo sapiens
aaacctctcaa

SEQ ID NO: 6740 - DNA, 11 bp, Homo sapiens
gaggtgctcta

SEQ ID NO: 6741 - DNA, 11 bp, Homo sapiens
agcccgccgcg

SEQ ID NO: 6742 - DNA, 11 bp, Homo sapiens
ctaacttcgtt

SEQ ID NO: 6743 - DNA, 11 bp, Homo sapiens
ggctttaccct

SEQ ID NO: 6744 - DNA, 11 bp, Homo sapiens
catctgtgagc

SEQ ID NO: 6745 - DNA, 11 bp, Homo sapiens
cccccaattct

SEQ ID NO: 6746 - DNA, 11 bp, Homo sapiens
aatttctattt

SEQ ID NO: 6747 - DNA, 11 bp, Homo sapiens
gcgattccgga

SEQ ID NO: 6748 - DNA, 11 bp, Homo sapiens
tcagtttggag

SEQ ID NO: 6749 - DNA, 11 bp, Homo sapiens
tgtcagagatg

SEQ ID NO: 6750 - DNA, 11 bp, Homo sapiens
attgcttttga

SEQ ID NO: 6751 - DNA, 11 bp, Homo sapiens
gctagtgatgt

SEQ ID NO: 6752 - DNA, 11 bp, Homo sapiens
ccggcgcgtgt

SEQ ID NO: 6753 - DNA, 11 bp, Homo sapiens
tgcaccacaga

SEQ ID NO: 6754 - DNA, 11 bp, Homo sapiens
atggccaactt

SEQ ID NO: 6755 - DNA, 11 bp, Homo sapiens
gtgtctcatct

SEQ ID NO: 6756 - DNA, 11 bp, Homo sapiens
atgagctatga

SEQ ID NO: 6757 - DNA, 11 bp, Homo sapiens
gtcagaacttg

SEQ ID NO: 6758 - DNA, 11 bp, Homo sapiens
ctgaaattcgg

SEQ ID NO: 6759 - DNA, 11 bp, Homo sapiens
acaaattatga

SEQ ID NO: 6760 - DNA, 11 bp, Homo sapiens
tttgcaattat

SEQ ID NO: 6761 - DNA, 11 bp, Homo sapiens
gggctggggta

SEQ ID NO: 6762 - DNA, 11 bp, Homo sapiens
gtggggctagg

SEQ ID NO: 6763 - DNA, 11 bp, Homo sapiens
gtgtgtaaaaa

SEQ ID NO: 6764 - DNA, 11 bp, Homo sapiens
aatggattacc

SEQ ID NO: 6765 - DNA, 11 bp, Homo sapiens
cttgtaacaga

SEQ ID NO: 6766 - DNA, 11 bp, Homo sapiens
gaaggcatctt

SEQ ID NO: 6767 - DNA, 11 bp, Homo sapiens
gggggccccgt

SEQ ID NO: 6768 - DNA, 11 bp, Homo sapiens
tgatgcgcgct

SEQ ID NO: 6769 - DNA, 11 bp, Homo sapiens
tctgtgacctt

SEQ ID NO: 6770 - DNA, 11 bp, Homo sapiens
agacaagttta

SEQ ID NO: 6771 - DNA, 11 bp, Homo sapiens
ttcctgactac

SEQ ID NO: 6772 - DNA, 11 bp, Homo sapiens
gcaataaatgg

SEQ ID NO: 6773 - DNA, 11 bp, Homo sapiens
aggagcggggt

SEQ ID NO: 6774 - DNA, 11 bp, Homo sapiens
tcagaagtttt

SEQ ID NO: 6775 - DNA, 11 bp, Homo sapiens
gcggggtaccc

SEQ ID NO: 6776 - DNA, 11 bp, Homo sapiens
gcgggagggct

SEQ ID NO: 6777 - DNA, 11 bp, Homo sapiens
aaagcaaacca

SEQ ID NO: 6778 - DNA, 11 bp, Homo sapiens
gcaccctcaga

SEQ ID NO: 6779 - DNA, 11 bp, Homo sapiens
atcttttaaaa

SEQ ID NO: 6780 - DNA, 11 bp, Homo sapiens
gggcagaattg

SEQ ID NO: 6781 - DNA, 11 bp, Homo sapiens
actttttaaaa

SEQ ID NO: 6782 - DNA, 11 bp, Homo sapiens
tattctcaata

SEQ ID NO: 6783 - DNA, 11 bp, Homo sapiens
cgctgtgtgct

SEQ ID NO: 6784 - DNA, 11 bp, Homo sapiens
tctggactcgg

SEQ ID NO: 6785 - DNA, 11 bp, Homo sapiens
tttcgtagatg

SEQ ID NO: 6786 - DNA, 11 bp, Homo sapiens
acaaatccttg

SEQ ID NO: 6787 - DNA, 11 bp, Homo sapiens
gtcttaactca

SEQ ID NO: 6788 - DNA, 11 bp, Homo sapiens
gagttatgttg

SEQ ID NO: 6789 - DNA, 11 bp, Homo sapiens
gagtagagaaa

SEQ ID NO: 6790 - DNA, 11 bp, Homo sapiens
ataggtcagaa

SEQ ID NO: 6791 - DNA, 11 bp, Homo sapiens
taatggtaact

SEQ ID NO: 6792 - DNA, 11 bp, Homo sapiens
gcagtggcctc

SEQ ID NO: 6793 - DNA, 11 bp, Homo sapiens
aacattctaag

SEQ ID NO: 6794 - DNA, 11 bp, Homo sapiens
tgagagacatc

SEQ ID NO: 6795 - DNA, 11 bp, Homo sapiens
tgctgcctgtt

SEQ ID NO: 6796 - DNA, 11 bp, Homo sapiens
tggatcctaga

SEQ ID NO: 6797 - DNA, 11 bp, Homo sapiens
gatcacagttt

SEQ ID NO: 6798 - DNA, 11 bp, Homo sapiens
aatggaaatcg

SEQ ID NO: 6799 - DNA, 11 bp, Homo sapiens
ttaatatatgc

SEQ ID NO: 6800 - DNA, 11 bp, Homo sapiens
ttttaaacttg

SEQ ID NO: 6801 - DNA, 11 bp, Homo sapiens
ccccagtcggc

SEQ ID NO: 6802 - DNA, 11 bp, Homo sapiens
ctgggtgaagt

SEQ ID NO: 6803 - DNA, 11 bp, Homo sapiens
atcaagaatcc

SEQ ID NO: 6804 - DNA, 11 bp, Homo sapiens
taataaatgct

SEQ ID NO: 6805 - DNA, 11 bp, Homo sapiens
attatttttct

SEQ ID NO: 6806 - DNA, 11 bp, Homo sapiens
attccaatctt

SEQ ID NO: 6807 - DNA, 11 bp, Homo sapiens
actgggtctat

SEQ ID NO: 6808 - DNA, 11 bp, Homo sapiens
ttaagaggggg

SEQ ID NO: 6809 - DNA, 11 bp, Homo sapiens
caaagacaatt

SEQ ID NO: 6810 - DNA, 11 bp, Homo sapiens
accctctccct

SEQ ID NO: 6811 - DNA, 11 bp, Homo sapiens
tggaccaggcg

SEQ ID NO: 6812 - DNA, 11 bp, Homo sapiens
atggtgctgac

SEQ ID NO: 6813 - DNA, 11 bp, Homo sapiens
ctttgatcagg

SEQ ID NO: 6814 - DNA, 11 bp, Homo sapiens
gatgacgactc

SEQ ID NO: 6815 - DNA, 11 bp, Homo sapiens
acaaacttagg

SEQ ID NO: 6816 - DNA, 11 bp, Homo sapiens
tctttacttga

SEQ ID NO: 6817 - DNA, 11 bp, Homo sapiens
agttgaaattc

SEQ ID NO: 6818 - DNA, 11 bp, Homo sapiens
tccggccgcga

SEQ ID NO: 6819 - DNA, 11 bp, Homo sapiens
atgcgaaaggc

SEQ ID NO: 6820 - DNA, 11 bp, Homo sapiens
aaataaagaat

SEQ ID NO: 6821 - DNA, 11 bp, Homo sapiens
gtgcctgtgct

SEQ ID NO: 6822 - DNA, 11 bp, Homo sapiens
taggaccctgc

SEQ ID NO: 6823 - DNA, 11 bp, Homo sapiens
gtaatgaagca

SEQ ID NO: 6824 - DNA, 11 bp, Homo sapiens
ccgaaaaagtg

SEQ ID NO: 6825 - DNA, 11 bp, Homo sapiens
cttcaggacct

SEQ ID NO: 6826 - DNA, 11 bp, Homo sapiens
gacacaggcag

SEQ ID NO: 6827 - DNA, 11 bp, Homo sapiens
caaataaaaag

SEQ ID NO: 6828 - DNA, 11 bp, Homo sapiens
gtgaaaaaaaa

SEQ ID NO: 6829 - DNA, 11 bp, Homo sapiens
gcagctcaggc

SEQ ID NO: 6830 - DNA, 11 bp, Homo sapiens
ttgacactttc

SEQ ID NO: 6831 - DNA, 11 bp, Homo sapiens
aactaatacta

SEQ ID NO: 6832 - DNA, 11 bp, Homo sapiens
ggtgatgagga

SEQ ID NO: 6833 - DNA, 11 bp, Homo sapiens
taagtttaatt

SEQ ID NO: 6834 - DNA, 11 bp, Homo sapiens
agaccatatta

SEQ ID NO: 6835 - DNA, 11 bp, Homo sapiens
tgggcagctgg

SEQ ID NO: 6836 - DNA, 11 bp, Homo sapiens
atattttcctg

SEQ ID NO: 6837 - DNA, 11 bp, Homo sapiens
atgcccgtgag

SEQ ID NO: 6838 - DNA, 11 bp, Homo sapiens
agctcttggag

SEQ ID NO: 6839 - DNA, 11 bp, Homo sapiens
ggccaaaggcc

SEQ ID NO: 6840 - DNA, 11 bp, Homo sapiens
atctgaagcaa

SEQ ID NO: 6841 - DNA, 11 bp, Homo sapiens
tagcattttaa

SEQ ID NO: 6842 - DNA, 11 bp, Homo sapiens
atgtggcacat

SEQ ID NO: 6843 - DNA, 11 bp, Homo sapiens
agtttcttgtc

SEQ ID NO: 6844 - DNA, 11 bp, Homo sapiens
aagtattgtgt

SEQ ID NO: 6845 - DNA, 11 bp, Homo sapiens
ttttgggggct

SEQ ID NO: 6846 - DNA, 11 bp, Homo sapiens
agtgtctgtga

SEQ ID NO: 6847 - DNA, 11 bp, Homo sapiens
tcacccacacc

SEQ ID NO: 6848 - DNA, 11 bp, Homo sapiens
aagattggtgg

SEQ ID NO: 6849 - DNA, 11 bp, Homo sapiens
tagttgaagtc

SEQ ID NO: 6850 - DNA, 11 bp, Homo sapiens
atactttaatc

SEQ ID NO: 6851 - DNA, 11 bp, Homo sapiens
atggctgggct

SEQ ID NO: 6852 - DNA, 11 bp, Homo sapiens
ttcgcttcctg

SEQ ID NO: 6853 - DNA, 11 bp, Homo sapiens
gaatgtaagta

SEQ ID NO: 6854 - DNA, 11 bp, Homo sapiens
ctttgctgtgt

SEQ ID NO: 6855 - DNA, 11 bp, Homo sapiens
cctgacgctcc

SEQ ID NO: 6856 - DNA, 11 bp, Homo sapiens
gggcctgacat

SEQ ID NO: 6857 - DNA, 11 bp, Homo sapiens
ggaagcacgga

SEQ ID NO: 6858 - DNA, 11 bp, Homo sapiens
tccttctccac

SEQ ID NO: 6859 - DNA, 11 bp, Homo sapiens
aaatagatcca

SEQ ID NO: 6860 - DNA, 11 bp, Homo sapiens
cagcccctctt

SEQ ID NO: 6861 - DNA, 11 bp, Homo sapiens
aatacctcgtg

SEQ ID NO: 6862 - DNA, 11 bp, Homo sapiens
ctggtcctcct

SEQ ID NO: 6863 - DNA, 11 bp, Homo sapiens
atcaagtggac

SEQ ID NO: 6864 - DNA, 11 bp, Homo sapiens
gcttatgttaa

SEQ ID NO: 6865 - DNA, 11 bp, Homo sapiens
agcttattgag

SEQ ID NO: 6866 - DNA, 11 bp, Homo sapiens
ggcttcctggg

SEQ ID NO: 6867 - DNA, 11 bp, Homo sapiens
gacatcgaggc

SEQ ID NO: 6868 - DNA, 11 bp, Homo sapiens
tgatgtctggt

SEQ ID NO: 6869 - DNA, 11 bp, Homo sapiens
gctaaggagat

SEQ ID NO: 6870 - DNA, 11 bp, Homo sapiens
gctgttgcgcg

SEQ ID NO: 6871 - DNA, 11 bp, Homo sapiens
gcagggtgggg

SEQ ID NO: 6872 - DNA, 11 bp, Homo sapiens
ggctgccctgg

SEQ ID NO: 6873 - DNA, 11 bp, Homo sapiens
cagtgaacaag

SEQ ID NO: 6874 - DNA, 11 bp, Homo sapiens
gtggcccgcag

SEQ ID NO: 6875 - DNA, 11 bp, Homo sapiens
ctgcagttagc

SEQ ID NO: 6876 - DNA, 11 bp, Homo sapiens
gaaaggatttt

SEQ ID NO: 6877 - DNA, 11 bp, Homo sapiens
tgcatatcatc

SEQ ID NO: 6878 - DNA, 11 bp, Homo sapiens
tgcgtcaccgt

SEQ ID NO: 6879 - DNA, 11 bp, Homo sapiens
tcttgatttac

SEQ ID NO: 6880 - DNA, 11 bp, Homo sapiens
gtgatggggcc

SEQ ID NO: 6881 - DNA, 11 bp, Homo sapiens
ggtgtgggtga

SEQ ID NO: 6882 - DNA, 11 bp, Homo sapiens
ggccactctag

SEQ ID NO: 6883 - DNA, 11 bp, Homo sapiens
ctcccttgccc

SEQ ID NO: 6884 - DNA, 11 bp, Homo sapiens
ggccctggtgt

SEQ ID NO: 6885 - DNA, 11 bp, Homo sapiens
aggttctgcct

SEQ ID NO: 6886 - DNA, 11 bp, Homo sapiens
tgataattcaa

SEQ ID NO: 6887 - DNA, 11 bp, Homo sapiens
ttttctgcata

SEQ ID NO: 6888 - DNA, 11 bp, Homo sapiens
tgttagatttc

SEQ ID NO: 6889 - DNA, 11 bp, Homo sapiens
tggaagaaact

SEQ ID NO: 6890 - DNA, 11 bp, Homo sapiens
gccaggtggaa

SEQ ID NO: 6891 - DNA, 11 bp, Homo sapiens
ttttgtttttg

SEQ ID NO: 6892 - DNA, 11 bp, Homo sapiens
ttaagagggac

SEQ ID NO: 6893 - DNA, 11 bp, Homo sapiens
ttggcaacatt

SEQ ID NO: 6894 - DNA, 11 bp, Homo sapiens
tcgaagaaccg

SEQ ID NO: 6895 - DNA, 11 bp, Homo sapiens
cacttttgggc

SEQ ID NO: 6896 - DNA, 11 bp, Homo sapiens
tttctgcactt

SEQ ID NO: 6897 - DNA, 11 bp, Homo sapiens
cagggcgggtt

SEQ ID NO: 6898 - DNA, 11 bp, Homo sapiens
taacctgctat

SEQ ID NO: 6899 - DNA, 11 bp, Homo sapiens
taccatcaata

SEQ ID NO: 6900 - DNA, 11 bp, Homo sapiens
actgaggtgcc

SEQ ID NO: 6901 - DNA, 11 bp, Homo sapiens
gccatattatg

SEQ ID NO: 6902 - DNA, 11 bp, Homo sapiens
attttagaatt

SEQ ID NO: 6903 - DNA, 11 bp, Homo sapiens
ttcaaaaaaaa

SEQ ID NO: 6904 - DNA, 11 bp, Homo sapiens
aggagctgctg

SEQ ID NO: 6905 - DNA, 11 bp, Homo sapiens
gggggtcaccg

SEQ ID NO: 6906 - DNA, 11 bp, Homo sapiens
ctgttagtgtg

SEQ ID NO: 6907 - DNA, 11 bp, Homo sapiens
cgccgacgatg

SEQ ID NO: 6908 - DNA, 11 bp, Homo sapiens
aaaaggttatg

SEQ ID NO: 6909 - DNA, 11 bp, Homo sapiens
taaacctgtct

SEQ ID NO: 6910 - DNA, 11 bp, Homo sapiens
gctgtgcctgg

SEQ ID NO: 6911 - DNA, 11 bp, Homo sapiens
tgcccactcat

SEQ ID NO: 6912 - DNA, 11 bp, Homo sapiens
cgggattcctc

SEQ ID NO: 6913 - DNA, 11 bp, Homo sapiens
ttgatgtacag

SEQ ID NO: 6914 - DNA, 11 bp, Homo sapiens
tttggaaatca

SEQ ID NO: 6915 - DNA, 11 bp, Homo sapiens
ttttattggaa

SEQ ID NO: 6916 - DNA, 11 bp, Homo sapiens
ggtagcctggg

SEQ ID NO: 6917 - DNA, 11 bp, Homo sapiens
atgcagccata

SEQ ID NO: 6918 - DNA, 11 bp, Homo sapiens
aattttatttc

SEQ ID NO: 6919 - DNA, 11 bp, Homo sapiens
cttaaggattc

SEQ ID NO: 6920 - DNA, 11 bp, Homo sapiens
actgaggaaag

SEQ ID NO: 6921 - DNA, 11 bp, Homo sapiens
ttttctgaaaa

SEQ ID NO: 6922 - DNA, 11 bp, Homo sapiens
gctgcaccggt

SEQ ID NO: 6923 - DNA, 11 bp, Homo sapiens
tacacgtgagg

SEQ ID NO: 6924 - DNA, 11 bp, Homo sapiens
ctgggcctggc

SEQ ID NO: 6925 - DNA, 11 bp, Homo sapiens
tttgtagatgg

SEQ ID NO: 6926 - DNA, 11 bp, Homo sapiens
gggggttggtt

SEQ ID NO: 6927 - DNA, 11 bp, Homo sapiens
tcctgcagctg

SEQ ID NO: 6928 - DNA, 11 bp, Homo sapiens
atgttagggat

SEQ ID NO: 6929 - DNA, 11 bp, Homo sapiens
gggtctgcggg

SEQ ID NO: 6930 - DNA, 11 bp, Homo sapiens
aacttgatacg

SEQ ID NO: 6931 - DNA, 11 bp, Homo sapiens
tgcattaactg

SEQ ID NO: 6932 - DNA, 11 bp, Homo sapiens
ttaaactccaa

SEQ ID NO: 6933 - DNA, 11 bp, Homo sapiens
acctgccgaca

SEQ ID NO: 6934 - DNA, 11 bp, Homo sapiens
aaggagctggc

SEQ ID NO: 6935 - DNA, 11 bp, Homo sapiens
cagggtcccca

SEQ ID NO: 6936 - DNA, 11 bp, Homo sapiens
tccgagccccc

SEQ ID NO: 6937 - DNA, 11 bp, Homo sapiens
ttagataagca

SEQ ID NO: 6938 - DNA, 11 bp, Homo sapiens
gttacaaacta

SEQ ID NO: 6939 - DNA, 11 bp, Homo sapiens
ttgggagtgag

SEQ ID NO: 6940 - DNA, 11 bp, Homo sapiens
ctggtgatggc

SEQ ID NO: 6941 - DNA, 11 bp, Homo sapiens
tacgtactgcc

SEQ ID NO: 6942 - DNA, 11 bp, Homo sapiens
gatgcctctgc

SEQ ID NO: 6943 - DNA, 11 bp, Homo sapiens
cttccagctaa

SEQ ID NO: 6944 - DNA, 11 bp, Homo sapiens
ttgttgttgaa

SEQ ID NO: 6945 - DNA, 11 bp, Homo sapiens
actgcttgccc

SEQ ID NO: 6946 - DNA, 11 bp, Homo sapiens
gctggggtggg

SEQ ID NO: 6947 - DNA, 11 bp, Homo sapiens
ggcaggcacaa

SEQ ID NO: 6948 - DNA, 11 bp, Homo sapiens
cagccaaataa

SEQ ID NO: 6949 - DNA, 11 bp, Homo sapiens
aatagctcagg

SEQ ID NO: 6950 - DNA, 11 bp, Homo sapiens
aagaagcaaga

SEQ ID NO: 6951 - DNA, 11 bp, Homo sapiens
tgttgtgcgcg

SEQ ID NO: 6952 - DNA, 11 bp, Homo sapiens
cctgtcctttc

SEQ ID NO: 6953 - DNA, 11 bp, Homo sapiens
cctatgtaagg

SEQ ID NO: 6954 - DNA, 11 bp, Homo sapiens
ctgggcgtgtc

SEQ ID NO: 6955 - DNA, 11 bp, Homo sapiens
tttccaatctc

SEQ ID NO: 6956 - DNA, 11 bp, Homo sapiens
ctaccagcacc

SEQ ID NO: 6957 - DNA, 11 bp, Homo sapiens
gggctgggccc

SEQ ID NO: 6958 - DNA, 11 bp, Homo sapiens
aaaaagcagat

SEQ ID NO: 6959 - DNA, 11 bp, Homo sapiens
ttttacagtac

SEQ ID NO: 6960 - DNA, 11 bp, Homo sapiens
ctgtgtaagct

SEQ ID NO: 6961 - DNA, 11 bp, Homo sapiens
cggcgctccct

SEQ ID NO: 6962 - DNA, 11 bp, Homo sapiens
gcatctgttta

SEQ ID NO: 6963 - DNA, 11 bp, Homo sapiens
ctctgctcggc

SEQ ID NO: 6964 - DNA, 11 bp, Homo sapiens
taggttcgtgt

SEQ ID NO: 6965 - DNA, 11 bp, Homo sapiens
tgaagtaacaa

SEQ ID NO: 6966 - DNA, 11 bp, Homo sapiens
ggggaaatcgc

SEQ ID NO: 6967 - DNA, 11 bp, Homo sapiens
ttgctagaggg

SEQ ID NO: 6968 - DNA, 11 bp, Homo sapiens
cagacgctccg

SEQ ID NO: 6969 - DNA, 11 bp, Homo sapiens
tggtgcagcat

SEQ ID NO: 6970 - DNA, 11 bp, Homo sapiens
tctgcaaatta

SEQ ID NO: 6971 - DNA, 11 bp, Homo sapiens
tgaatggccta

SEQ ID NO: 6972 - DNA, 11 bp, Homo sapiens
gaaatgatgag

SEQ ID NO: 6973 - DNA, 11 bp, Homo sapiens
cgccgcggtgg

SEQ ID NO: 6974 - DNA, 11 bp, Homo sapiens
ttgtaaaagga

SEQ ID NO: 6975 - DNA, 11 bp, Homo sapiens
agcagggctcc

SEQ ID NO: 6976 - DNA, 11 bp, Homo sapiens
tgagcctcgtg

SEQ ID NO: 6977 - DNA, 11 bp, Homo sapiens
gaaatacagtg

SEQ ID NO: 6978 - DNA, 11 bp, Homo sapiens
gataatttttg

SEQ ID NO: 6979 - DNA, 11 bp, Homo sapiens
ggcgccaaaaa

SEQ ID NO: 6980 - DNA, 11 bp, Homo sapiens
ccaataaagtg

SEQ ID NO: 6981 - DNA, 11 bp, Homo sapiens
atctttctggc

SEQ ID NO: 6982 - DNA, 11 bp, Homo sapiens
gctgcggtcct

SEQ ID NO: 6983 - DNA, 11 bp, Homo sapiens
caattacctgc

SEQ ID NO: 6984 - DNA, 11 bp, Homo sapiens
cacgaagatgc

SEQ ID NO: 6985 - DNA, 11 bp, Homo sapiens
agaacaaaacc

SEQ ID NO: 6986 - DNA, 11 bp, Homo sapiens
ggtgcccagtt

SEQ ID NO: 6987 - DNA, 11 bp, Homo sapiens
gagagtgtctg

SEQ ID NO: 6988 - DNA, 11 bp, Homo sapiens
gcacaagaaga

SEQ ID NO: 6989 - DNA, 11 bp, Homo sapiens
ttttatctggt

SEQ ID NO: 6990 - DNA, 11 bp, Homo sapiens
tgtttgggggc

SEQ ID NO: 6991 - DNA, 11 bp, Homo sapiens
actgtctccag

SEQ ID NO: 6992 - DNA, 11 bp, Homo sapiens
atggccagaaa

SEQ ID NO: 6993 - DNA, 11 bp, Homo sapiens
tatttttgtta

SEQ ID NO: 6994 - DNA, 11 bp, Homo sapiens
ggggagctcgg

SEQ ID NO: 6995 - DNA, 11 bp, Homo sapiens
actgccccaac

SEQ ID NO: 6996 - DNA, 11 bp, Homo sapiens
tgaatctgggt

SEQ ID NO: 6997 - DNA, 11 bp, Homo sapiens
acctctctaaa

SEQ ID NO: 6998 - DNA, 11 bp, Homo sapiens
gagagctacat

SEQ ID NO: 6999 - DNA, 11 bp, Homo sapiens
aggtaaaagag

SEQ ID NO: 7000 - DNA, 11 bp, Homo sapiens
gtgctgcgtga

SEQ ID NO: 7001 - DNA, 11 bp, Homo sapiens
gggatggcagc

SEQ ID NO: 7002 - DNA, 11 bp, Homo sapiens
ccaaaaaaaaa

SEQ ID NO: 7003 - DNA, 11 bp, Homo sapiens
gccccaggtag

SEQ ID NO: 7004 - DNA, 11 bp, Homo sapiens
aaacctgggaa

SEQ ID NO: 7005 - DNA, 11 bp, Homo sapiens
gggggagggaa

SEQ ID NO: 7006 - DNA, 11 bp, Homo sapiens
tgtaagtctgc

SEQ ID NO: 7007 - DNA, 11 bp, Homo sapiens
acgtggtgatg

SEQ ID NO: 7008 - DNA, 11 bp, Homo sapiens
caggacagttt

SEQ ID NO: 7009 - DNA, 11 bp, Homo sapiens
accgtattcca

SEQ ID NO: 7010 - DNA, 11 bp, Homo sapiens
gccgatcctcg

SEQ ID NO: 7011 - DNA, 11 bp, Homo sapiens
ttgtctgcctt

SEQ ID NO: 7012 - DNA, 11 bp, Homo sapiens
gagagtgtact

SEQ ID NO: 7013 - DNA, 11 bp, Homo sapiens
gggggaatttt

SEQ ID NO: 7014 - DNA, 11 bp, Homo sapiens
atttttggtgg

SEQ ID NO: 7015 - DNA, 11 bp, Homo sapiens
atccggcgcca

SEQ ID NO: 7016 - DNA, 11 bp, Homo sapiens
tctgtcaagac

SEQ ID NO: 7017 - DNA, 11 bp, Homo sapiens
cggactcactg

SEQ ID NO: 7018 - DNA, 11 bp, Homo sapiens
aaaccccaata

SEQ ID NO: 7019 - DNA, 11 bp, Homo sapiens
tcaacttctgg

SEQ ID NO: 7020 - DNA, 11 bp, Homo sapiens
gaccagcccat

SEQ ID NO: 7021 - DNA, 11 bp, Homo sapiens
agcaagccccc

SEQ ID NO: 7022 - DNA, 11 bp, Homo sapiens
ttgtcgatggg

SEQ ID NO: 7023 - DNA, 11 bp, Homo sapiens
tacagcacgga

SEQ ID NO: 7024 - DNA, 11 bp, Homo sapiens
gaaaccgaggg

SEQ ID NO: 7025 - DNA, 11 bp, Homo sapiens
gtgttaaccag

SEQ ID NO: 7026 - DNA, 11 bp, Homo sapiens
gttggtctgta

SEQ ID NO: 7027 - DNA, 11 bp, Homo sapiens
tctttccccaa

SEQ ID NO: 7028 - DNA, 11 bp, Homo sapiens
gtctttcttgg

SEQ ID NO: 7029 - DNA, 11 bp, Homo sapiens
ctcagacagtg

SEQ ID NO: 7030 - DNA, 11 bp, Homo sapiens
gaacacatcca

SEQ ID NO: 7031 - DNA, 11 bp, Homo sapiens
gggtttttatt

SEQ ID NO: 7032 - DNA, 11 bp, Homo sapiens
agaacctttgc

SEQ ID NO: 7033 - DNA, 11 bp, Homo sapiens
gcctgattttt

SEQ ID NO: 7034 - DNA, 11 bp, Homo sapiens
gagaggttgat

SEQ ID NO: 7035 - DNA, 11 bp, Homo sapiens
tgtagtttgag

SEQ ID NO: 7036 - DNA, 11 bp, Homo sapiens
aaggagatggg

SEQ ID NO: 7037 - DNA, 11 bp, Homo sapiens
aacgctgcctg

SEQ ID NO: 7038 - DNA, 11 bp, Homo sapiens
cagcctccctg

SEQ ID NO: 7039 - DNA, 11 bp, Homo sapiens
ttaatagtggg

SEQ ID NO: 7040 - DNA, 11 bp, Homo sapiens
tggccccaccc

SEQ ID NO: 7041 - DNA, 11 bp, Homo sapiens
tgaaataaaac

SEQ ID NO: 7042 - DNA, 11 bp, Homo sapiens
tccctggctgt

SEQ ID NO: 7043 - DNA, 11 bp, Homo sapiens
tataccaatca

SEQ ID NO: 7044 - DNA, 11 bp, Homo sapiens
cagataacata

SEQ ID NO: 7045 - DNA, 11 bp, Homo sapiens
tggatcctcgt

SEQ ID NO: 7046 - DNA, 11 bp, Homo sapiens
cctatcagtaa

SEQ ID NO: 7047 - DNA, 11 bp, Homo sapiens
aggtcagaggg

SEQ ID NO: 7048 - DNA, 11 bp, Homo sapiens
cctgccccttc

SEQ ID NO: 7049 - DNA, 11 bp, Homo sapiens
ggtactcgatg

SEQ ID NO: 7050 - DNA, 11 bp, Homo sapiens
tttggaatgtt

SEQ ID NO: 7051 - DNA, 11 bp, Homo sapiens
ctggatctggg

SEQ ID NO: 7052 - DNA, 11 bp, Homo sapiens
gtgccatattt

SEQ ID NO: 7053 - DNA, 11 bp, Homo sapiens
tacatccgaat

SEQ ID NO: 7054 - DNA, 11 bp, Homo sapiens
gaagttatgaa

SEQ ID NO: 7055 - DNA, 11 bp, Homo sapiens
tttatttctac

SEQ ID NO: 7056 - DNA, 11 bp, Homo sapiens
tcaacggtgtg

SEQ ID NO: 7057 - DNA, 11 bp, Homo sapiens
cctcttcaggc

SEQ ID NO: 7058 - DNA, 11 bp, Homo sapiens
tcagttcttga

SEQ ID NO: 7059 - DNA, 11 bp, Homo sapiens
cctttccttta

SEQ ID NO: 7060 - DNA, 11 bp, Homo sapiens
accgccgtggt

SEQ ID NO: 7061 - DNA, 11 bp, Homo sapiens
gtaaaagttct

SEQ ID NO: 7062 - DNA, 11 bp, Homo sapiens
gtttcaggtaa

SEQ ID NO: 7063 - DNA, 11 bp, Homo sapiens
ttccagacctt

SEQ ID NO: 7064 - DNA, 11 bp, Homo sapiens
ttatgggatct

SEQ ID NO: 7065 - DNA, 11 bp, Homo sapiens
gtggggggagg

SEQ ID NO: 7066 - DNA, 11 bp, Homo sapiens
taattttggat

SEQ ID NO: 7067 - DNA, 11 bp, Homo sapiens
gggcagatgcc

SEQ ID NO: 7068 - DNA, 11 bp, Homo sapiens
gttctcccact

SEQ ID NO: 7069 - DNA, 11 bp, Homo sapiens
aagccagcccc

SEQ ID NO: 7070 - DNA, 11 bp, Homo sapiens
ggccccatttt

SEQ ID NO: 7071 - DNA, 11 bp, Homo sapiens
taatattttta

SEQ ID NO: 7072 - DNA, 11 bp, Homo sapiens
gcgggtgtgga

SEQ ID NO: 7073 - DNA, 11 bp, Homo sapiens
cccagatgata

SEQ ID NO: 7074 - DNA, 11 bp, Homo sapiens
ggtttgattac

SEQ ID NO: 7075 - DNA, 11 bp, Homo sapiens
taattactctt

SEQ ID NO: 7076 - DNA, 11 bp, Homo sapiens
tgtactactta

SEQ ID NO: 7077 - DNA, 11 bp, Homo sapiens
aggatgacccc

SEQ ID NO: 7078 - DNA, 11 bp, Homo sapiens
ctctgtgtgga

SEQ ID NO: 7079 - DNA, 11 bp, Homo sapiens
ctcttatcacc

SEQ ID NO: 7080 - DNA, 11 bp, Homo sapiens
atagacataaa

SEQ ID NO: 7081 - DNA, 11 bp, Homo sapiens
ttttctgctgg

SEQ ID NO: 7082 - DNA, 11 bp, Homo sapiens
gtctcacgtgg

SEQ ID NO: 7083 - DNA, 11 bp, Homo sapiens
cacacaatgtg

SEQ ID NO: 7084 - DNA, 11 bp, Homo sapiens
gattggggatt

SEQ ID NO: 7085 - DNA, 11 bp, Homo sapiens
gcccctccggc

SEQ ID NO: 7086 - DNA, 11 bp, Homo sapiens
aaaaaactcca

SEQ ID NO: 7087 - DNA, 11 bp, Homo sapiens
ctcttcaggag

SEQ ID NO: 7088 - DNA, 11 bp, Homo sapiens
cagaagaggct

SEQ ID NO: 7089 - DNA, 11 bp, Homo sapiens
ggaacggatgt

SEQ ID NO: 7090 - DNA, 11 bp, Homo sapiens
gagtgggggct

SEQ ID NO: 7091 - DNA, 11 bp, Homo sapiens
gaatcggttat

SEQ ID NO: 7092 - DNA, 11 bp, Homo sapiens
aatatgcttta

SEQ ID NO: 7093 - DNA, 11 bp, Homo sapiens
gtgtctcgcag

SEQ ID NO: 7094 - DNA, 11 bp, Homo sapiens
cttaaatatca

SEQ ID NO: 7095 - DNA, 11 bp, Homo sapiens
gtggagcggag

SEQ ID NO: 7096 - DNA, 11 bp, Homo sapiens
acaaactgtgg

SEQ ID NO: 7097 - DNA, 11 bp, Homo sapiens
tattttgtgag

SEQ ID NO: 7098 - DNA, 11 bp, Homo sapiens
tgcatctggtg

SEQ ID NO: 7099 - DNA, 11 bp, Homo sapiens
gtggctgctgt

SEQ ID NO: 7100 - DNA, 11 bp, Homo sapiens
gaaagagctga

SEQ ID NO: 7101 - DNA, 11 bp, Homo sapiens
gagtcagcatt

SEQ ID NO: 7102 - DNA, 11 bp, Homo sapiens
attggcttaaa

SEQ ID NO: 7103 - DNA, 11 bp, Homo sapiens
tttgtttttga

SEQ ID NO: 7104 - DNA, 11 bp, Homo sapiens
accattggatt

SEQ ID NO: 7105 - DNA, 11 bp, Homo sapiens
aggcgagatca

SEQ ID NO: 7106 - DNA, 11 bp, Homo sapiens
ggattgtctgg

SEQ ID NO: 7107 - DNA, 11 bp, Homo sapiens
ggcgcctcctt

SEQ ID NO: 7108 - DNA, 11 bp, Homo sapiens
aaaatgtactg

SEQ ID NO: 7109 - DNA, 11 bp, Homo sapiens
tactgtggatc

SEQ ID NO: 7110 - DNA, 11 bp, Homo sapiens
atggttaaagg

SEQ ID NO: 7111 - DNA, 11 bp, Homo sapiens
ccagcgtggaa

SEQ ID NO: 7112 - DNA, 11 bp, Homo sapiens
ttggacctggg

SEQ ID NO: 7113 - DNA, 11 bp, Homo sapiens
ttggactgagc

SEQ ID NO: 7114 - DNA, 11 bp, Homo sapiens
tgccttacttt

SEQ ID NO: 7115 - DNA, 11 bp, Homo sapiens
ttagcagttgg

SEQ ID NO: 7116 - DNA, 11 bp, Homo sapiens
tgcaggcctgg

SEQ ID NO: 7117 - DNA, 11 bp, Homo sapiens
ccccctcgtgc

SEQ ID NO: 7118 - DNA, 11 bp, Homo sapiens
tagtcttaaca

SEQ ID NO: 7119 - DNA, 11 bp, Homo sapiens
gcccacatccg

SEQ ID NO: 7120 - DNA, 11 bp, Homo sapiens
tgagagggtgt

SEQ ID NO: 7121 - DNA, 11 bp, Homo sapiens
ccttggtgccg

SEQ ID NO: 7122 - DNA, 11 bp, Homo sapiens
attgtgaggcc

SEQ ID NO: 7123 - DNA, 11 bp, Homo sapiens
gagaatctgct

SEQ ID NO: 7124 - DNA, 11 bp, Homo sapiens
ccgggcgtggt

SEQ ID NO: 7125 - DNA, 11 bp, Homo sapiens
actccctcctt

SEQ ID NO: 7126 - DNA, 11 bp, Homo sapiens
tatcgttgcct

SEQ ID NO: 7127 - DNA, 11 bp, Homo sapiens
tgctactggta

SEQ ID NO: 7128 - DNA, 11 bp, Homo sapiens
attcttcggac

SEQ ID NO: 7129 - DNA, 11 bp, Homo sapiens
taccagcacag

SEQ ID NO: 7130 - DNA, 11 bp, Homo sapiens
aactacatagg

SEQ ID NO: 7131 - DNA, 11 bp, Homo sapiens
taactggagga

SEQ ID NO: 7132 - DNA, 11 bp, Homo sapiens
cctgaactggc

SEQ ID NO: 7133 - DNA, 11 bp, Homo sapiens
ccgtagtgcct

SEQ ID NO: 7134 - DNA, 11 bp, Homo sapiens
aactgcggcag

SEQ ID NO: 7135 - DNA, 11 bp, Homo sapiens
tgttctccatt

SEQ ID NO: 7136 - DNA, 11 bp, Homo sapiens
tgtttttatgt

SEQ ID NO: 7137 - DNA, 11 bp, Homo sapiens
cctcctctgac

SEQ ID NO: 7138 - DNA, 11 bp, Homo sapiens
ccaaatgctgg

SEQ ID NO: 7139 - DNA, 11 bp, Homo sapiens
ccggcccctcc

SEQ ID NO: 7140 - DNA, 11 bp, Homo sapiens
caagttagtgg

SEQ ID NO: 7141 - DNA, 11 bp, Homo sapiens
gggggcgcctt

SEQ ID NO: 7142 - DNA, 11 bp, Homo sapiens
atataggtcgt

SEQ ID NO: 7143 - DNA, 11 bp, Homo sapiens
ctgccttcttg

SEQ ID NO: 7144 - DNA, 11 bp, Homo sapiens
cgtactgagcg

SEQ ID NO: 7145 - DNA, 11 bp, Homo sapiens
gacccctgtca

SEQ ID NO: 7146 - DNA, 11 bp, Homo sapiens
gcttgttctct

SEQ ID NO: 7147 - DNA, 11 bp, Homo sapiens
ctgcagaccca

SEQ ID NO: 7148 - DNA, 11 bp, Homo sapiens
ctgtgcatttt

SEQ ID NO: 7149 - DNA, 11 bp, Homo sapiens
agtttcccaat

SEQ ID NO: 7150 - DNA, 11 bp, Homo sapiens
gggtgcttggt

SEQ ID NO: 7151 - DNA, 11 bp, Homo sapiens
agctgtgtaaa

SEQ ID NO: 7152 - DNA, 11 bp, Homo sapiens
caagataaatt

SEQ ID NO: 7153 - DNA, 11 bp, Homo sapiens
atagaggcaat

SEQ ID NO: 7154 - DNA, 11 bp, Homo sapiens
tggtgacagtt

SEQ ID NO: 7155 - DNA, 11 bp, Homo sapiens
cagctcatcta

SEQ ID NO: 7156 - DNA, 11 bp, Homo sapiens
ggggtctgggc

SEQ ID NO: 7157 - DNA, 11 bp, Homo sapiens
actgcgaggac

SEQ ID NO: 7158 - DNA, 11 bp, Homo sapiens
acgcaggcgcc

SEQ ID NO: 7159 - DNA, 11 bp, Homo sapiens
gactaagaaat

SEQ ID NO: 7160 - DNA, 11 bp, Homo sapiens
tgggcttgcct

SEQ ID NO: 7161 - DNA, 11 bp, Homo sapiens
cgcgcccggcc

SEQ ID NO: 7162 - DNA, 11 bp, Homo sapiens
gtgaagctgat

SEQ ID NO: 7163 - DNA, 11 bp, Homo sapiens
tgaaactcatc

SEQ ID NO: 7164 - DNA, 11 bp, Homo sapiens
ctgccaacttc

SEQ ID NO: 7165 - DNA, 11 bp, Homo sapiens
taggatggggt

SEQ ID NO: 7166 - DNA, 11 bp, Homo sapiens
tacttgtgtgt

SEQ ID NO: 7167 - DNA, 11 bp, Homo sapiens
tcagcttcacc

SEQ ID NO: 7168 - DNA, 11 bp, Homo sapiens
cctccacctag

SEQ ID NO: 7169 - DNA, 11 bp, Homo sapiens
cggttactgtg

SEQ ID NO: 7170 - DNA, 11 bp, Homo sapiens
gagccttggtg

SEQ ID NO: 7171 - DNA, 11 bp, Homo sapiens
ggagctctgtg

SEQ ID NO: 7172 - DNA, 11 bp, Homo sapiens
ggtttgtgtgt

SEQ ID NO: 7173 - DNA, 11 bp, Homo sapiens
cgatattcccc

SEQ ID NO: 7174 - DNA, 11 bp, Homo sapiens
ggaagttcaaa

SEQ ID NO: 7175 - DNA, 11 bp, Homo sapiens
aatggaatgga

SEQ ID NO: 7176 - DNA, 11 bp, Homo sapiens
tctgcctgggg

SEQ ID NO: 7177 - DNA, 11 bp, Homo sapiens
agatcctactt

SEQ ID NO: 7178 - DNA, 11 bp, Homo sapiens
ggaatccaatc

SEQ ID NO: 7179 - DNA, 11 bp, Homo sapiens
cttgcctgaag

SEQ ID NO: 7180 - DNA, 11 bp, Homo sapiens
gcctggccatc

SEQ ID NO: 7181 - DNA, 11 bp, Homo sapiens
tcctgctgccg

SEQ ID NO: 7182 - DNA, 11 bp, Homo sapiens
caccttccagc

SEQ ID NO: 7183 - DNA, 11 bp, Homo sapiens
tccaatactgc

SEQ ID NO: 7184 - DNA, 11 bp, Homo sapiens
cagctgtagtt

SEQ ID NO: 7185 - DNA, 11 bp, Homo sapiens
agaatatcagt

SEQ ID NO: 7186 - DNA, 11 bp, Homo sapiens
tcctagtagga

SEQ ID NO: 7187 - DNA, 11 bp, Homo sapiens
accaagctggg

SEQ ID NO: 7188 - DNA, 11 bp, Homo sapiens
aagaatttgaa

SEQ ID NO: 7189 - DNA, 11 bp, Homo sapiens
gccccgagccc

SEQ ID NO: 7190 - DNA, 11 bp, Homo sapiens
aaggaagatcc

SEQ ID NO: 7191 - DNA, 11 bp, Homo sapiens
cagtttgtaca

SEQ ID NO: 7192 - DNA, 11 bp, Homo sapiens
cgtgttaatgg

SEQ ID NO: 7193 - DNA, 11 bp, Homo sapiens
gcggttgtggc

SEQ ID NO: 7194 - DNA, 11 bp, Homo sapiens
aaagttctcag

SEQ ID NO: 7195 - DNA, 11 bp, Homo sapiens
atacagaataa

SEQ ID NO: 7196 - DNA, 11 bp, Homo sapiens
acctttactgt

SEQ ID NO: 7197 - DNA, 11 bp, Homo sapiens
tgggcctggct

SEQ ID NO: 7198 - DNA, 11 bp, Homo sapiens
cataaagttta

SEQ ID NO: 7199 - DNA, 11 bp, Homo sapiens
tgtcctggttc

SEQ ID NO: 7200 - DNA, 11 bp, Homo sapiens
cggtttgcatc

SEQ ID NO: 7201 - DNA, 11 bp, Homo sapiens
ttctgtgtcac

SEQ ID NO: 7202 - DNA, 11 bp, Homo sapiens
aagttctgcgg

SEQ ID NO: 7203 - DNA, 11 bp, Homo sapiens
tgctcctaccc

SEQ ID NO: 7204 - DNA, 11 bp, Homo sapiens
gttgctgccct

SEQ ID NO: 7205 - DNA, 11 bp, Homo sapiens
agggttggaag

SEQ ID NO: 7206 - DNA, 11 bp, Homo sapiens
atccggggagc

SEQ ID NO: 7207 - DNA, 11 bp, Homo sapiens
tttttgtacag

SEQ ID NO: 7208 - DNA, 11 bp, Homo sapiens
tttcagagaga

SEQ ID NO: 7209 - DNA, 11 bp, Homo sapiens
gttaacgtccc

SEQ ID NO: 7210 - DNA, 11 bp, Homo sapiens
ctgatggcaga

SEQ ID NO: 7211 - DNA, 11 bp, Homo sapiens
cctttggctag

SEQ ID NO: 7212 - DNA, 11 bp, Homo sapiens
taagtggaata

SEQ ID NO: 7213 - DNA, 11 bp, Homo sapiens
gtgctggagaa

SEQ ID NO: 7214 - DNA, 11 bp, Homo sapiens
taaggagctga

SEQ ID NO: 7215 - DNA, 11 bp, Homo sapiens
cacccctgatg

SEQ ID NO: 7216 - DNA, 11 bp, Homo sapiens
cccctctgagt

SEQ ID NO: 7217 - DNA, 11 bp, Homo sapiens
actaccttcac

SEQ ID NO: 7218 - DNA, 11 bp, Homo sapiens
gggcccaggag

SEQ ID NO: 7219 - DNA, 11 bp, Homo sapiens
ggccctgagcg

SEQ ID NO: 7220 - DNA, 11 bp, Homo sapiens
taaccaatcag

SEQ ID NO: 7221 - DNA, 11 bp, Homo sapiens
gctgcccttga

SEQ ID NO: 7222 - DNA, 11 bp, Homo sapiens
tttggggctgg

SEQ ID NO: 7223 - DNA, 11 bp, Homo sapiens
cccctccctcc

SEQ ID NO: 7224 - DNA, 11 bp, Homo sapiens
aataaatggat

SEQ ID NO: 7225 - DNA, 11 bp, Homo sapiens
ggaaaaaaaaa

SEQ ID NO: 7226 - DNA, 11 bp, Homo sapiens
ggaaaagtggt

SEQ ID NO: 7227 - DNA, 11 bp, Homo sapiens
tggcttgctca

SEQ ID NO: 7228 - DNA, 11 bp, Homo sapiens
gcccgtgccac

SEQ ID NO: 7229 - DNA, 11 bp, Homo sapiens
ccacccccacc

SEQ ID NO: 7230 - DNA, 11 bp, Homo sapiens
ggtggctttgc

SEQ ID NO: 7231 - DNA, 11 bp, Homo sapiens
aatgctggcaa

SEQ ID NO: 7232 - DNA, 11 bp, Homo sapiens
gaccgaggtgg

SEQ ID NO: 7233 - DNA, 11 bp, Homo sapiens
cagagatgaat

SEQ ID NO: 7234 - DNA, 11 bp, Homo sapiens
atctgaagcag

SEQ ID NO: 7235 - DNA, 11 bp, Homo sapiens
tgcagcgcctg

SEQ ID NO: 7236 - DNA, 11 bp, Homo sapiens
gccaggaagcc

SEQ ID NO: 7237 - DNA, 11 bp, Homo sapiens
cttttcttctg

SEQ ID NO: 7238 - DNA, 11 bp, Homo sapiens
gcgccgcccca

SEQ ID NO: 7239 - DNA, 11 bp, Homo sapiens
atggggcaggg

SEQ ID NO: 7240 - DNA, 11 bp, Homo sapiens
cattcctcctt

SEQ ID NO: 7241 - DNA, 11 bp, Homo sapiens
acaacgtccag

SEQ ID NO: 7242 - DNA, 11 bp, Homo sapiens
ctcttcgagaa

SEQ ID NO: 7243 - DNA, 11 bp, Homo sapiens
ggctcccactg

SEQ ID NO: 7244 - DNA, 11 bp, Homo sapiens
gtatcttcaca

SEQ ID NO: 7245 - DNA, 11 bp, Homo sapiens
cttaaatctgg

SEQ ID NO: 7246 - DNA, 11 bp, Homo sapiens
gatgcgcttgt

SEQ ID NO: 7247 - DNA, 11 bp, Homo sapiens
tagacttattg

SEQ ID NO: 7248 - DNA, 11 bp, Homo sapiens
acgattgatga

SEQ ID NO: 7249 - DNA, 11 bp, Homo sapiens
gcaacgggccc

SEQ ID NO: 7250 - DNA, 11 bp, Homo sapiens
ataaattgggt

SEQ ID NO: 7251 - DNA, 11 bp, Homo sapiens
ttttaaattag

SEQ ID NO: 7252 - DNA, 11 bp, Homo sapiens
ctcggtgatgt

SEQ ID NO: 7253 - DNA, 11 bp, Homo sapiens
agatgtgtggg

SEQ ID NO: 7254 - DNA, 11 bp, Homo sapiens
acggctccgag

SEQ ID NO: 7255 - DNA, 11 bp, Homo sapiens
cctctcctccc

SEQ ID NO: 7256 - DNA, 11 bp, Homo sapiens
tacattctgtg

SEQ ID NO: 7257 - DNA, 11 bp, Homo sapiens
tgctgactccc

SEQ ID NO: 7258 - DNA, 11 bp, Homo sapiens
ccgctgcttgt

SEQ ID NO: 7259 - DNA, 11 bp, Homo sapiens
taacattaaag

SEQ ID NO: 7260 - DNA, 11 bp, Homo sapiens
tggagcgctac

SEQ ID NO: 7261 - DNA, 11 bp, Homo sapiens
ccctctttgga

SEQ ID NO: 7262 - DNA, 11 bp, Homo sapiens
gtgctggacct

SEQ ID NO: 7263 - DNA, 11 bp, Homo sapiens
gccacacccca

SEQ ID NO: 7264 - DNA, 11 bp, Homo sapiens
taattcttctc

SEQ ID NO: 7265 - DNA, 11 bp, Homo sapiens
gtgtgtggtgc

SEQ ID NO: 7266 - DNA, 11 bp, Homo sapiens
gcaacagcaat

SEQ ID NO: 7267 - DNA, 11 bp, Homo sapiens
ggtgtggaagt

SEQ ID NO: 7268 - DNA, 11 bp, Homo sapiens
gagcgggatgg

SEQ ID NO: 7269 - DNA, 11 bp, Homo sapiens
acactacgggt

SEQ ID NO: 7270 - DNA, 11 bp, Homo sapiens
gctggagctag

SEQ ID NO: 7271 - DNA, 11 bp, Homo sapiens
taacttgtgac

SEQ ID NO: 7272 - DNA, 11 bp, Homo sapiens
taagatttcaa

SEQ ID NO: 7273 - DNA, 11 bp, Homo sapiens
acaagtaccca

SEQ ID NO: 7274 - DNA, 11 bp, Homo sapiens
gggccccaaag

SEQ ID NO: 7275 - DNA, 11 bp, Homo sapiens
catcctgctgc

SEQ ID NO: 7276 - DNA, 11 bp, Homo sapiens
ccaggggagaa

SEQ ID NO: 7277 - DNA, 11 bp, Homo sapiens
tgctgtgtgct

SEQ ID NO: 7278 - DNA, 11 bp, Homo sapiens
tgaaagtgtgg

SEQ ID NO: 7279 - DNA, 11 bp, Homo sapiens
aaacattgggg

SEQ ID NO: 7280 - DNA, 11 bp, Homo sapiens
tggaaccttgc

SEQ ID NO: 7281 - DNA, 11 bp, Homo sapiens
tgaagagaaga

SEQ ID NO: 7282 - DNA, 11 bp, Homo sapiens
cctgtgacagc

SEQ ID NO: 7283 - DNA, 11 bp, Homo sapiens
caactaattca

SEQ ID NO: 7284 - DNA, 11 bp, Homo sapiens
aaggccttgtg

SEQ ID NO: 7285 - DNA, 11 bp, Homo sapiens
agagccctagg

SEQ ID NO: 7286 - DNA, 11 bp, Homo sapiens
tttttactgat

SEQ ID NO: 7287 - DNA, 11 bp, Homo sapiens
gctggctggct

SEQ ID NO: 7288 - DNA, 11 bp, Homo sapiens
cgttcctgcgg

SEQ ID NO: 7289 - DNA, 11 bp, Homo sapiens
ccatttttacc

SEQ ID NO: 7290 - DNA, 11 bp, Homo sapiens
atgcgggagaa

SEQ ID NO: 7291 - DNA, 11 bp, Homo sapiens
tttgtgtcacg

SEQ ID NO: 7292 - DNA, 11 bp, Homo sapiens
tcctccctccc

SEQ ID NO: 7293 - DNA, 11 bp, Homo sapiens
ggcacagtaaa

SEQ ID NO: 7294 - DNA, 11 bp, Homo sapiens
ctaataaatgc

SEQ ID NO: 7295 - DNA, 11 bp, Homo sapiens
tgtcgctgggg

SEQ ID NO: 7296 - DNA, 11 bp, Homo sapiens
ggccatctctt

SEQ ID NO: 7297 - DNA, 11 bp, Homo sapiens
cacttgaaaag

SEQ ID NO: 7298 - DNA, 11 bp, Homo sapiens
gacagctgagc

SEQ ID NO: 7299 - DNA, 11 bp, Homo sapiens
gctgctccctt

SEQ ID NO: 7300 - DNA, 11 bp, Homo sapiens
gcggagagagg

SEQ ID NO: 7301 - DNA, 11 bp, Homo sapiens
tcaggcatttt

SEQ ID NO: 7302 - DNA, 11 bp, Homo sapiens
caattaaaagg

SEQ ID NO: 7303 - DNA, 11 bp, Homo sapiens
caacttagttt

SEQ ID NO: 7304 - DNA, 11 bp, Homo sapiens
gcaggtggttt

SEQ ID NO: 7305 - DNA, 11 bp, Homo sapiens
gctgtcatcag

SEQ ID NO: 7306 - DNA, 11 bp, Homo sapiens
gagcgggatca

SEQ ID NO: 7307 - DNA, 11 bp, Homo sapiens
attaacaaagc

SEQ ID NO: 7308 - DNA, 11 bp, Homo sapiens
tgccgttttga

SEQ ID NO: 7309 - DNA, 11 bp, Homo sapiens
ccgtgctcatc

SEQ ID NO: 7310 - DNA, 11 bp, Homo sapiens
aaggcacagac

SEQ ID NO: 7311 - DNA, 11 bp, Homo sapiens
atttgtcccag

SEQ ID NO: 7312 - DNA, 11 bp, Homo sapiens
aaggccgagta

SEQ ID NO: 7313 - DNA, 11 bp, Homo sapiens
atagtagcttc

SEQ ID NO: 7314 - DNA, 11 bp, Homo sapiens
ggactggccca

SEQ ID NO: 7315 - DNA, 11 bp, Homo sapiens
actcagaagag

SEQ ID NO: 7316 - DNA, 11 bp, Homo sapiens
ctgagctgtac

SEQ ID NO: 7317 - DNA, 11 bp, Homo sapiens
acttaaggaac

SEQ ID NO: 7318 - DNA, 11 bp, Homo sapiens
gctatttgaaa

SEQ ID NO: 7319 - DNA, 11 bp, Homo sapiens
ttctctctgtt

SEQ ID NO: 7320 - DNA, 11 bp, Homo sapiens
gggagcccggg

SEQ ID NO: 7321 - DNA, 11 bp, Homo sapiens
aatatgtgggc

SEQ ID NO: 7322 - DNA, 11 bp, Homo sapiens
gctctctatgc

SEQ ID NO: 7323 - DNA, 11 bp, Homo sapiens
tgagtggtcac

SEQ ID NO: 7324 - DNA, 11 bp, Homo sapiens
attcagcacct

SEQ ID NO: 7325 - DNA, 11 bp, Homo sapiens
cctgttctcct

SEQ ID NO: 7326 - DNA, 11 bp, Homo sapiens
tgggaagtggg

SEQ ID NO: 7327 - DNA, 11 bp, Homo sapiens
gatcccaactg

SEQ ID NO: 7328 - DNA, 11 bp, Homo sapiens
ttaataaaagt

SEQ ID NO: 7329 - DNA, 11 bp, Homo sapiens
cctcgctcagt

SEQ ID NO: 7330 - DNA, 11 bp, Homo sapiens
actcctgtcct

SEQ ID NO: 7331 - DNA, 11 bp, Homo sapiens
gagccgcctct

SEQ ID NO: 7332 - DNA, 11 bp, Homo sapiens
cttgattccca

SEQ ID NO: 7333 - DNA, 11 bp, Homo sapiens
tggcaaccttt

SEQ ID NO: 7334 - DNA, 11 bp, Homo sapiens
ttatggggagg

SEQ ID NO: 7335 - DNA, 11 bp, Homo sapiens
tcatagaaacc

SEQ ID NO: 7336 - DNA, 11 bp, Homo sapiens
gaggaagaaga

SEQ ID NO: 7337 - DNA, 11 bp, Homo sapiens
acaaaccccca

SEQ ID NO: 7338 - DNA, 11 bp, Homo sapiens
gcttagaagtg

SEQ ID NO: 7339 - DNA, 11 bp, Homo sapiens
actggtacgtg

SEQ ID NO: 7340 - DNA, 11 bp, Homo sapiens
ccaggaggaat

SEQ ID NO: 7341 - DNA, 11 bp, Homo sapiens
gggacgagtga

SEQ ID NO: 7342 - DNA, 11 bp, Homo sapiens
gtacccggaca

SEQ ID NO: 7343 - DNA, 11 bp, Homo sapiens
ggctttgattt

SEQ ID NO: 7344 - DNA, 11 bp, Homo sapiens
ttgggagcagg

SEQ ID NO: 7345 - DNA, 11 bp, Homo sapiens
tctgcaaaaaa

SEQ ID NO: 7346 - DNA, 11 bp, Homo sapiens
ggggatggggt

SEQ ID NO: 7347 - DNA, 11 bp, Homo sapiens
cgtgggtgggg

SEQ ID NO: 7348 - DNA, 11 bp, Homo sapiens
ttccgcgtgcc

SEQ ID NO: 7349 - DNA, 11 bp, Homo sapiens
gagaaccgtag

SEQ ID NO: 7350 - DNA, 11 bp, Homo sapiens
ttacgaggaag

SEQ ID NO: 7351 - DNA, 11 bp, Homo sapiens
ttgcttttgtt

SEQ ID NO: 7352 - DNA, 11 bp, Homo sapiens
gaagatgtgtg

SEQ ID NO: 7353 - DNA, 11 bp, Homo sapiens
gattttgtagc

SEQ ID NO: 7354 - DNA, 11 bp, Homo sapiens
tcgtcgcagaa

SEQ ID NO: 7355 - DNA, 11 bp, Homo sapiens
gaggctcaatc

SEQ ID NO: 7356 - DNA, 11 bp, Homo sapiens
tagaaaaataa

SEQ ID NO: 7357 - DNA, 11 bp, Homo sapiens
ccgggtgatgg

SEQ ID NO: 7358 - DNA, 11 bp, Homo sapiens
gaagctttgca

SEQ ID NO: 7359 - DNA, 11 bp, Homo sapiens
ggttattttgg

SEQ ID NO: 7360 - DNA, 11 bp, Homo sapiens
tgtgctcgggg

SEQ ID NO: 7361 - DNA, 11 bp, Homo sapiens
atggcgatcta

SEQ ID NO: 7362 - DNA, 11 bp, Homo sapiens
aaaataaagag

SEQ ID NO: 7363 - DNA, 11 bp, Homo sapiens
ggtgcagagcc

SEQ ID NO: 7364 - DNA, 11 bp, Homo sapiens
cattgaagggt

SEQ ID NO: 7365 - DNA, 11 bp, Homo sapiens
tgactgaagcc

SEQ ID NO: 7366 - DNA, 11 bp, Homo sapiens
aacgcggccaa

SEQ ID NO: 7367 - DNA, 11 bp, Homo sapiens
gccgtgtagac

SEQ ID NO: 7368 - DNA, 11 bp, Homo sapiens
agggtgaaact

SEQ ID NO: 7369 - DNA, 11 bp, Homo sapiens
aaggtaatgct

SEQ ID NO: 7370 - DNA, 11 bp, Homo sapiens
acagtggggat

SEQ ID NO: 7371 - DNA, 11 bp, Homo sapiens
gaaccctggga

SEQ ID NO: 7372 - DNA, 11 bp, Homo sapiens
taaataatttc

SEQ ID NO: 7373 - DNA, 11 bp, Homo sapiens
gaaataaaagc

SEQ ID NO: 7374 - DNA, 11 bp, Homo sapiens
gaattaacatt

SEQ ID NO: 7375 - DNA, 11 bp, Homo sapiens
ggtagcaggga

SEQ ID NO: 7376 - DNA, 11 bp, Homo sapiens
gtttaaatcga

SEQ ID NO: 7377 - DNA, 11 bp, Homo sapiens
gacgtcttaat

SEQ ID NO: 7378 - DNA, 11 bp, Homo sapiens
tactagtcctc

SEQ ID NO: 7379 - DNA, 11 bp, Homo sapiens
cgattctggag

SEQ ID NO: 7380 - DNA, 11 bp, Homo sapiens
actggtaaaaa

SEQ ID NO: 7381 - DNA, 11 bp, Homo sapiens
aaggagtttga

SEQ ID NO: 7382 - DNA, 11 bp, Homo sapiens
gtgacaacact

SEQ ID NO: 7383 - DNA, 11 bp, Homo sapiens
ggagtcattgt

SEQ ID NO: 7384 - DNA, 11 bp, Homo sapiens
tgtataaaaat

SEQ ID NO: 7385 - DNA, 11 bp, Homo sapiens
gcagacattga

SEQ ID NO: 7386 - DNA, 11 bp, Homo sapiens
gaggatggtgt

SEQ ID NO: 7387 - DNA, 11 bp, Homo sapiens
tcaaatgcatc

SEQ ID NO: 7388 - DNA, 11 bp, Homo sapiens
tgcttgtccct

SEQ ID NO: 7389 - DNA, 11 bp, Homo sapiens
aatgtgagtca

SEQ ID NO: 7390 - DNA, 11 bp, Homo sapiens
cggcccaacgc

SEQ ID NO: 7391 - DNA, 11 bp, Homo sapiens
gtttcatctcc

SEQ ID NO: 7392 - DNA, 11 bp, Homo sapiens
aaggaatcggg

SEQ ID NO: 7393 - DNA, 11 bp, Homo sapiens
aaagtgaagat

SEQ ID NO: 7394 - DNA, 11 bp, Homo sapiens
tcagaaggtgc

SEQ ID NO: 7395 - DNA, 11 bp, Homo sapiens
gggcctgtgcc

SEQ ID NO: 7396 - DNA, 11 bp, Homo sapiens
agaaataccaa

SEQ ID NO: 7397 - DNA, 11 bp, Homo sapiens
ggaagtttcga

SEQ ID NO: 7398 - DNA, 11 bp, Homo sapiens
gggggtaacta

SEQ ID NO: 7399 - DNA, 11 bp, Homo sapiens
catttcataac

SEQ ID NO: 7400 - DNA, 11 bp, Homo sapiens
ggctttggagt

SEQ ID NO: 7401 - DNA, 11 bp, Homo sapiens
ggcgtcctggc

SEQ ID NO: 7402 - DNA, 11 bp, Homo sapiens
tagactagcaa

SEQ ID NO: 7403 - DNA, 11 bp, Homo sapiens
ccgatcaccgg

SEQ ID NO: 7404 - DNA, 11 bp, Homo sapiens
gaatccaactg

SEQ ID NO: 7405 - DNA, 11 bp, Homo sapiens
cagcgcgccct

SEQ ID NO: 7406 - DNA, 11 bp, Homo sapiens
gcataggctgc

SEQ ID NO: 7407 - DNA, 11 bp, Homo sapiens
atccctcagtg

SEQ ID NO: 7408 - DNA, 11 bp, Homo sapiens
ctgttggcatt

SEQ ID NO: 7409 - DNA, 11 bp, Homo sapiens
caggaacgggg

SEQ ID NO: 7410 - DNA, 11 bp, Homo sapiens
gaaaaatttaa

SEQ ID NO: 7411 - DNA, 11 bp, Homo sapiens
gactcttcagt

SEQ ID NO: 7412 - DNA, 11 bp, Homo sapiens
cctggtcccaa

SEQ ID NO: 7413 - DNA, 11 bp, Homo sapiens
ggggactgaag

SEQ ID NO: 7414 - DNA, 11 bp, Homo sapiens
gggcgctgtgg

SEQ ID NO: 7415 - DNA, 11 bp, Homo sapiens
tgagggaataa

SEQ ID NO: 7416 - DNA, 11 bp, Homo sapiens
ggaacaaacag

SEQ ID NO: 7417 - DNA, 11 bp, Homo sapiens
aacgacctcgt

SEQ ID NO: 7418 - DNA, 11 bp, Homo sapiens
aagggagcacc

SEQ ID NO: 7419 - DNA, 11 bp, Homo sapiens
gccgggtgggc

SEQ ID NO: 7420 - DNA, 11 bp, Homo sapiens
cctccagctac

SEQ ID NO: 7421 - DNA, 11 bp, Homo sapiens
caaaccatcca

SEQ ID NO: 7422 - DNA, 11 bp, Homo Sapiens
gagagctaact

SEQ ID NO: 7423 - DNA, 11 bp, Homo Sapiens
gctgccctggg

SEQ ID NO: 7424 - DNA, 11 bp, Homo Sapiens
gggtctgaggg

SEQ ID NO: 7425 - DNA, 11 bp, Homo Sapiens
acctggagggg

SEQ ID NO: 7426 - DNA, 11 bp, Homo Sapiens
agggtggtgag

SEQ ID NO: 7427 - DNA, 11 bp, Homo Sapiens
ccaccgcctgc

SEQ ID NO: 7428 - DNA, 11 bp, Homo Sapiens
gacgatgtata

SEQ ID NO: 7429 - DNA, 11 bp, Homo Sapiens
ggccacgtagc

SEQ ID NO: 7430 - DNA, 11 bp, Homo Sapiens
accaaggacag

SEQ ID NO: 7431 - DNA, 11 bp, Homo Sapiens
agatttgggta

SEQ ID NO: 7432 - DNA, 11 bp, Homo Sapiens
aggaactctga

SEQ ID NO: 7433 - DNA, 11 bp, Homo Sapiens
atgctggacac

SEQ ID NO: 7434 - DNA, 11 bp, Homo Sapiens
gaggagtccat

SEQ ID NO: 7435 - DNA, 11 bp, Homo Sapiens
cctctttgcat

SEQ ID NO: 7436 - DNA, 11 bp, Homo Sapiens
gcagtgcgtgc

SEQ ID NO: 7437 - DNA, 11 bp, Homo Sapiens
cagagcctgca

SEQ ID NO: 7438 - DNA, 11 bp, Homo Sapiens
cgcaacttcag

SEQ ID NO: 7439 - DNA, 11 bp, Homo Sapiens
cgtctgtaatc

SEQ ID NO: 7440 - DNA, 11 bp, Homo Sapiens
gcgtcggtgca

SEQ ID NO: 7441 - DNA, 11 bp, Homo Sapiens
cccagttaaaa

SEQ ID NO: 7442 - DNA, 11 bp, Homo Sapiens
aaaccccatct

SEQ ID NO: 7443 - DNA, 11 bp, Homo Sapiens
aaccctggaga

SEQ ID NO: 7444 - DNA, 11 bp, Homo Sapiens
aagataataaa

SEQ ID NO: 7445 - DNA, 11 bp, Homo Sapiens
acactaggcaa

SEQ ID NO: 7446 - DNA, 11 bp, Homo Sapiens
agcctgggaag

SEQ ID NO: 7447 - DNA, 11 bp, Homo Sapiens
agctgagtttg

SEQ ID NO: 7448 - DNA, 11 bp, Homo Sapiens
aggcaatgttt

SEQ ID NO: 7449 - DNA, 11 bp, Homo Sapiens
atgaagaagga

SEQ ID NO: 7450 - DNA, 11 bp, Homo Sapiens
caggaggactg

SEQ ID NO: 7451 - DNA, 11 bp, Homo Sapiens
catcccttgcc

SEQ ID NO: 7452 - DNA, 11 bp, Homo Sapiens
cgccagtaatc

SEQ ID NO: 7453 - DNA, 11 bp, Homo Sapiens
ctcttgtactg

SEQ ID NO: 7454 - DNA, 11 bp, Homo Sapiens
ctttgtgatgc

SEQ ID NO: 7455 - DNA, 11 bp, Homo Sapiens
gagtgagcaga

SEQ ID NO: 7456 - DNA, 11 bp, Homo Sapiens
gatgttgataa

SEQ ID NO: 7457 - DNA, 11 bp, Homo Sapiens
gcccactgctc

SEQ ID NO: 7458 - DNA, 11 bp, Homo Sapiens
gtgaggctttg

SEQ ID NO: 7459 - DNA, 11 bp, Homo Sapiens
gtgttgcacgc

SEQ ID NO: 7460 - DNA, 11 bp, Homo Sapiens
tcaaaacccaa

SEQ ID NO: 7461 - DNA, 11 bp, Homo Sapiens
tctcaaaataa

SEQ ID NO: 7462 - DNA, 11 bp, Homo Sapiens
tcttctgaaaa

SEQ ID NO: 7463 - DNA, 11 bp, Homo Sapiens
tgcctgtaagt

SEQ ID NO: 7464 - DNA, 11 bp, Homo Sapiens
tgggcaggtgt

SEQ ID NO: 7465 - DNA, 11 bp, Homo Sapiens
tgttttttctc

SEQ ID NO: 7466 - DNA, 11 bp, Homo Sapiens
ggagagaaaag

SEQ ID NO: 7467 - DNA, 11 bp, Homo Sapiens
agcctaggagt

SEQ ID NO: 7468 - DNA, 11 bp, Homo Sapiens
ccagcgccaac

SEQ ID NO: 7469 - DNA, 11 bp, Homo Sapiens
ccatcttgagg

SEQ ID NO: 7470 - DNA, 11 bp, Homo Sapiens
gcaaaattctg

SEQ ID NO: 7471 - DNA, 11 bp, Homo Sapiens
gctttcaccca

SEQ ID NO: 7472 - DNA, 11 bp, Homo Sapiens
cctgtaatcaa

SEQ ID NO: 7473 - DNA, 11 bp, Homo Sapiens
gtgtggtggag

SEQ ID NO: 7474 - DNA, 11 bp, Homo Sapiens
ctcgtgggaaa

SEQ ID NO: 7475 - DNA, 11 bp, Homo Sapiens
gtggtgcacag

SEQ ID NO: 7476 - DNA, 11 bp, Homo Sapiens
acggggaaaaa

SEQ ID NO: 7477 - DNA, 11 bp, Homo Sapiens
caaactttaat

SEQ ID NO: 7478 - DNA, 11 bp, Homo Sapiens
cacagtagctc

SEQ ID NO: 7479 - DNA, 11 bp, Homo Sapiens
cccctgtgctc

SEQ ID NO: 7480 - DNA, 11 bp, Homo Sapiens
cccggttaatt

SEQ ID NO: 7481 - DNA, 11 bp, Homo Sapiens
cgcaacctcat

SEQ ID NO: 7482 - DNA, 11 bp, Homo Sapiens
cgtttaagtca

SEQ ID NO: 7483 - DNA, 11 bp, Homo Sapiens
ctagcctgggt

SEQ ID NO: 7484 - DNA, 11 bp, Homo Sapiens
gcagacacctg

SEQ ID NO: 7485 - DNA, 11 bp, Homo Sapiens
gcagtggtgag

SEQ ID NO: 7486 - DNA, 11 bp, Homo Sapiens
gccaacatagt

SEQ ID NO: 7487 - DNA, 11 bp, Homo Sapiens
gccagtgccct

SEQ ID NO: 7488 - DNA, 11 bp, Homo Sapiens
gcgaaaaccct

SEQ ID NO: 7489 - DNA, 11 bp, Homo Sapiens
ggagagcagca

SEQ ID NO: 7490 - DNA, 11 bp, Homo Sapiens
ggagggagttt

SEQ ID NO: 7491 - DNA, 11 bp, Homo Sapiens
gtgggaggatt

SEQ ID NO: 7492 - DNA, 11 bp, Homo Sapiens
tgcaaaggctg

SEQ ID NO: 7493 - DNA, 11 bp, Homo Sapiens
ccttgggcaca

SEQ ID NO: 7494 - DNA, 11 bp, Homo Sapiens
gtcagttcctg

SEQ ID NO: 7495 - DNA, 11 bp, Homo Sapiens
gtgtcacgtgc

SEQ ID NO: 7496 - DNA, 11 bp, Homo Sapiens
aggaggtcgct

SEQ ID NO: 7497 - DNA, 11 bp, Homo Sapiens
gtggtgagtac

SEQ ID NO: 7498 - DNA, 11 bp, Homo Sapiens
agaatgagatc

SEQ ID NO: 7499 - DNA, 11 bp, Homo Sapiens
aaggccagcaa

1-30. (canceled)

31. A process for the identification of genes expressed in skin, comprising the steps of:
a) isolating a mixture from human or animal skin, wherein the mixture comprises expressed genetically coded factors;
b) subjecting the mixture isolated in a) to a serial analysis of gene expression, wherein genes expressed in skin are identified and their expression quantified.

32. A process for the identification of genes expressed in skin, comprising the steps of:
a) isolating a first mixture from human or animal skin, wherein the mixture comprises expressed genetically coded factors;
b) isolating a second mixture from tissue other than skin, wherein the mixture comprises expressed genetically coded factors;
c) subjecting the first and second mixtures in a) and b) to a serial analysis of gene expression to obtain gene expression patterns for each mixture; and
d) comparing the gene expression patterns obtained in c), wherein genes expressed differentially in skin compared to tissue other than skin are identified.

33. A process for the determination of the homeostasis of the skin, comprising the steps of:
a) isolating a first mixture from skin, wherein the mixture comprises expressed genetically coded factors comprising one or more of proteins, fragments of proteins, mRNA molecules, or fragments of mRNA molecules;
b) isolating a second mixture from tissue other than skin, wherein the mixture comprises expressed genetically coded factors comprising one or more of proteins, fragments of proteins, mRNA molecules, or fragments of mRNA molecules;
c) subjecting the first and second mixtures in a) and b) to a serial analysis of gene expression, wherein the results identify genes expressed differentially in skin as compared to tissue other than skin;
d) isolating a third mixture from skin, wherein the mixture comprises expressed genetically coded factors comprising one or more of proteins, fragments of proteins, mRNA molecules, or fragments of mRNA molecules;
e) obtaining a gene expression pattern for the third mixture by measuring the genetically coded factors produced by expression of at least one of the genes identified in c) as expressed differentially in skin, as compared to tissue other than skin;
f) comparing the gene expression pattern generated in e) with the results of the serial analysis of gene expression in c), wherein a gene expression pattern is indicative of skin in homeostasis if it contains predominantly genetically coded factors expressed by one or more genes identified in c) as expressed more strongly in skin, as compared to tissue other than skin and wherein a gene expression pattern is indicative of skin in disturbed homeostasis if it contains predominantly genetically coded factors expressed by one or more genes identified in c) as expressed more strongly in tissue other than skin as compared to skin.

34. A process for the determination of homeostasis of the skin, comprising the steps of:
a) isolating a mixture from skin, wherein the mixture comprises expressed genetically coded factors comprising one or more of proteins, fragments of proteins, mRNA molecules, or fragments of mRNA molecules;
b) obtaining a gene expression pattern for the mixture by measuring the expression of genetically coded factors expressed by one or more genes defined by their UniGene Accession Number in Tables 1 to 5, column 7 and in Table 7, column 6;
c) comparing the gene expression pattern obtained in b) with the relative expression frequencies shown in Tables 1 to 5 and 7, columns 3 and 4, and the expression quotients indicated in column 5, wherein the gene expression pattern is indicative of skin in homeostasis if it predominantly contains genetically coded factors expressed by genes which are expressed more strongly in skin than in tissues other than skin, whereas the gene expression pattern is indicative of skin in disturbed homeostasis if it predominantly contains genetically coded factors expressed by genes which are expressed more strongly in tissues other than skin than they are in skin.

35. The process according to claim 34, wherein:
in step b), the gene expression pattern for the mixture is obtained by measuring genetically coded factors expressed by one or more genes defined by their UniGene Accession Number in Tables 1 to 5, column 7 and in Table 7, column 6; and
in step c), the gene expression pattern obtained in b) is compared with the relative expression frequencies shown in Tables 1 to 5 and 7, columns 3 and 4, and the expression quotients indicated in column 5, wherein gene expression pattern is indicative of skin in homeostasis if it predominantly contains genetically coded factors expressed by genes which are expressed at least twice as strongly in skin as in tissues other than skin, whereas the gene expression pattern is indicative skin in disturbed homeostasis if it predominantly contains genetically coded factors expressed by genes which are expressed at least twice as strongly in tissues other than skin as they are in skin.

36. The process according to claim 34, wherein:
in step b), the gene expression pattern for the mixture is obtained by measuring genetically coded factors expressed by one or more genes defined by their UniGene Accession Number in Tables 2 to 5, column 7 and in Table 7, column 6; and
in step c), the gene expression pattern obtained in b) is compared with the relative expression frequencies shown in Tables 2 to 5 and 7, columns 3 and 4, and the expression quotients indicated in column 5, wherein gene expression pattern is indicative of skin in homeostasis if it predominantly contains genetically coded factors expressed by genes which are expressed at least five times as strongly in skin as in tissues that are not skin, whereas the gene expression pattern is indicative skin in disturbed homeostasis if it predominantly contains genetically coded factors expressed by genes which are expressed at least five times as strongly in tissues other than skin as they are in skin.

37. The process according to claim 34, wherein:
in step b), the gene expression pattern for the mixture is obtained by measuring genetically coded factors expressed by one or more genes defined by their UniGene Accession Number in Tables 3 to 5, column 7 and in Table 7, column 6; and
in step c), the gene expression pattern obtained in b) is compared with the relative expression frequencies shown in Tables 3 to 5 and 7, columns 3 and 4, and the expression quotients indicated in column 5, wherein gene expression pattern is indicative of skin in homeostasis if it predominantly contains genetically coded factors expressed by genes which are expressed at least ten times as strongly in skin as in tissues that are not skin, whereas the gene expression pattern is indicative skin in disturbed homeostasis if it predominantly contains genetically coded factors expressed by genes which are expressed at least ten times as strongly in tissues other than skin as they are in skin.

38. The process according to claim 34, wherein:
in step b), the gene expression pattern for the mixture is obtained by measuring genetically coded factors expressed by one or more genes defined by their UniGene Accession Number in Tables 4 and 5, column 7 and in Table 7, column 6; and
in step c), the gene expression pattern obtained in b) is compared with the relative expression frequencies shown in Tables 4 and 5 and 7, columns 3 and 4, and the expression quotients indicated in column 5, wherein gene expression pattern is indicative of skin in homeostasis if it predominantly contains genetically coded factors expressed by genes which are expressed at least twenty times as strongly in skin as in tissues that are not skin, whereas the gene expression pattern is indicative skin in disturbed homeostasis if it predominantly contains genetically coded factors expressed by genes which are expressed at least twenty times as strongly in tissues other than skin as they are in skin.

39. The process according to claim 34, wherein:
in step b), the gene expression pattern for the mixture is obtained by measuring genetically coded factors expressed by one or more genes defined by their UniGene Accession Number in Table 5, column 7; and
in step c), the gene expression pattern obtained in b) is compared with the relative expression frequencies shown in Table 5, columns 3 and 4, and the expression quotients indicated in column 5, wherein gene expression pattern is indicative of skin in homeostasis if it predominantly contains genetically coded factors expressed by genes which are expressed at least 100 times as strongly in skin as in tissues that are not skin, whereas the gene expression pattern is indicative skin in disturbed homeostasis if it predominantly contains genetically coded factors expressed by genes which are expressed at least 100 times as strongly in tissues other than skin as they are in skin.

40. A process for the determination of homeostasis of the skin, comprising the steps of:
a) isolating a mixture from skin comprising expressed genetically coded factors comprising one or more of proteins, mRNA molecules, fragments of proteins or fragments of mRNA molecules;
b) quantifying the expression of at least two of the expressed genetically coded factors isolated in a)
c) calculating the expression ratios of at least two of the expressed genetically coded factors whose expression was quantified in b);
d) comparing the expression ratios calculated in c) to the expression ratios shown in Table 6, column 3 and in Tables 1 to 5, column 4, wherein expression ratios calculated in c) corresponding to skin in Table 6, column 3 and in Tables 1 to 5, column 4 are indicative of skin in homeostasis, expression ratios calculated in c) that do not correspond to the expression ratios for skin shown in Table 6, column 3 and in Tables 1 to 5, column 4 are indicative of skin in disturbed homeostasis.

41. A combination comprising a plurality of genes which are differentially expressed in skin in compared to other tissues.

42. The combination of claim 41, wherein the plurality of genes is selected from the genes identified by their UniGene Accession Number in Tables 1 to 5, column 7 and in Table 7, column 6.

43. A combination comprising two or more polynucleotides differentially expressed in skin versus tissue that is not skin, wherein the polynucleotides comprise sequences selected from the group consisting of SEQ ID NOs: 1-7499 and sequences complementary to SEQ ID NOs:1-7499, or fragments thereof.

44. A composition of matter comprising two or more probes for detecting expression of genes differentially expressed in skin compared to other tissues, wherein the probes comprise one or more of oligonucleotides or polynucleotides that specifically hybridize to two or more nucleic acid molecules or fragments thereof that are defined by their UniGene Accession Number in Tables 1 to 5, column 7 and in Table 7, column 6.

45. A composition of matter comprising two or more probes for detecting expression of genes differentially expressed in skin compared to other tissues, wherein the probes comprise polypeptide binding agents that specifically bind to polypeptides or fragments thereof produced by expression of two or more nucleic acid molecules that are defined by their UniGene Accession Number in Tables 1 to 5, column 7 and in Table 7, column 6.

46. The process of claim 34 wherein the mixture is isolated from a skin sample.

47. The process of claim 34 wherein the mixture is isolated from a whole skin sample.

48. The process of claim 34 wherein the mixture is isolated from an epidermis sample.

49. The process of claim 34 wherein the mixture is obtained by microdialysis.

50. The process of claim 34 wherein the gene expression pattern is obtained by measuring the expression of one or more mRNA molecules or fragments of mRNA molecules using one or more methods selected from the group consisting of: northern blots, reverse transcriptase polymerase chain reaction (RT-PCR), RNase protection experiments, dot blots, cDNA sequencing, clone hybridization, differential display, subtractive hybridization, cDNA fragment fingerprinting, total gene expression analysis (TOGA), serial analysis of gene expression (SAGE), and the use of nucleic acid chips.

51. The process of claim 34 wherein the gene expression pattern is obtained by measuring the expression of one or more proteins or fragments of proteins by one or more methods selected from the group consisting of: one- or two-dimensional gel electrophoresis, affinity chromatography, protein/protein complexing in solution, mass spectrometry, Matrix Assisted Laser Desorption Ionization (MALDI), and the use of protein chips.

52. The process of claim 34 wherein 1 to about 5,000 expressed genetically coded factors identified by their UniGene Accession Number in Tables 1 to 5, column 7 and in Table 7, column 6 are quantified in step b).

53. The process of claim 34 wherein 1 to about 1,000 expressed genetically coded factors identified by their UniGene Accession Number in Tables 1 to 5, column 7 and in Table 7, column 6 are quantified in step b).

54. The process of claim 34 wherein about 10 to about 500 expressed genetically coded factors identified by their UniGene Accession Number in Tables 1 to 5, column 7 and in Table 7, column 6 are quantified in step b).

55. The process of claim 34 wherein about 10 to about 250 expressed genetically coded factors identified by their UniGene Accession Number in Tables 1 to 5, column 7 and in Table 7, column 6 are quantified in step b).

56. The process of claim 34 wherein about 10 to about 100 expressed genetically coded factors identified by their UniGene Accession Number in Tables 1 to 5, column 7 and in Table 7, column 6 are quantified in step b).

57. The process of claim 34 wherein about 10 to about 50 expressed genetically coded factors identified by their UniGene Accession Number in Tables 1 to 5, column 7 and in Table 7, column 6 are quantified in step b).

58. A test kit for the determination of stress or ageing of the skin comprising means for carrying out the process of claim 34.

59. A biochip for the determination of stress or ageing of the skin comprising a support and probes which are capable of binding specifically to at least one of the proteins, fragments of proteins, mRNA molecules, or fragments of mRNA molecules which are expressed by genes which are defined by their UniGene Accession Number in Tables 1 to 5, column 7 and in Table 7; wherein the probes are immobilized on the support.

60. The biochip of claim 59 comprising 1 to about 5,000 different probes.

61. The biochip of claim 59 comprising 1 to about 1,000 different probes.

62. The biochip of claim 59 comprising about 10 to about 500 different probes.

63. The biochip of claim 59 comprising about 10 to about 250 different probes.

64. The biochip of claim 59 comprising about 10 to about 100 different probes.

65. The biochip of claim 59 comprising about 10 to about 50 different probes.

66. The biochip of claim 59 wherein the probes comprise nucleic acid probes.

67. The biochip of claim 66 wherein the probes comprise RNA probes.

68. The biochip of claim 66 wherein the probes comprise PNA probes.

69. The biochip of claim 66 wherein the probes comprise DNA probes.

70. The biochip of claim 59 comprising probes having a length of about 10 to about 1,000 nucleotides.

71. The biochip of claim 59 comprising probes having a length of about 10 to about 800 nucleotides.

72. The biochip of claim 59 comprising probes having a length of about 100 to about 600 nucleotides.

73. The biochip of claim 59 comprising probes having a length of about 200 to about 400 nucleotides.

74. The biochip of claim 59 wherein the probes comprise peptide or protein probes.

75. The biochip of claim 74 wherein the probes comprise antibody probes.

76. A process for identifying a substance effective for maintaining or promoting the homeostasis of the skin or for the treatment of pathological conditions of the skin, comprising the steps of:
a) determining the homeostasis of the skin using the process of claim 34,
b) applying at least one substance to the skin,
c) re-determining the homeostasis of the skin by the process of claim 34,
d) identifying effective substances by comparing the results from a) and c.

77. The process of claim 76 wherein the pathological conditions of the skin comprise one or more of neurodermatitis, sunburn, psoriasis, scleroderma, ichtyosis, atopic dermatitis, acne, seborrhoea, lupus erythematodes, roseacea, melanoma, basalioma, skin carcinoma, and skin sarcoma.

78. A screening method for identifying substances effective in treating a pathological condition of the skin comprising the steps of:
a) determining the expression pattern of the skin by assaying a skin sample for the expression of at least one of the proteins, fragments of proteins, mRNA molecules, or fragments of mRNA molecules using the biochip of claim 59,
b) applying a test substance to the skin;
c) re-determining the expression pattern of the skin by assaying a skin sample for the expression of at least one of the proteins, fragments of proteins, mRNA molecules, or fragments of mRNA molecules using the biochip of claim 59; and
d) identifying effective substances by comparing the results from a) and c).

79. A process for determining the effectiveness of a substance in treating a pathological condition of the skin comprising the steps of:
a) contacting a test skin sample with a test substance;
a) obtaining from the test skin sample an expression pattern of at least one of the genes which are identified by their UniGene Accession Number in Tables 1 to 5, column 7 and in Table 7, column 6; and
c) comparing the gene expression pattern obtained in b) with the pattern of a standard skin sample not contacted with the test substance, wherein a difference in the gene expression pattern between the test sample and the standard sample is indicative of the effectiveness of the test substance.

80. The process of claim 79 wherein the pathological condition of the skin comprises one or more of: neurodermatitis, sunburn, psoriasis, scleroderma, ichtyosis, atopic dermatitis, acne, seborrhoea, lupus erythematodes, roseacea, melanoma, basalioma, skin carcinoma, and skin sarcoma.

81. A process for the production of a cosmetic or pharmaceutical preparation for maintaining or promoting homeostasis of the skin comprising the steps of:
a) identifying at least one effective substance by the process of claim 79; and
b) mixing the substance with additional ingredients comprising suitable carriers.
